United States Patent Application Publication US 2007/0054278 A1 - sequence listing, part 53

SEQ ID NO: 95064 - DNA, 53113 bp, Homo sapiens
caccttccctgagggcaggcccacagcacagctgccactgcccacacctgagcattctgcctgtggcctgtggaccattctgcctctgcctatcacaaaaagcatgtaaacgcactaccacagggccagaggacaagttggccagcccagtaccattcctccagtactcaagcatgctatccagggacctgaaaatcacccatcccaatctatgaccattgacacctgaatggccactcctgctggggtctaaggttgggctgacccatcctgctgatactatcacagctggcagtgctaccagtgcaactcaacctgtcacagccctcgccaataccagcacaaactgcttgggccccagtgggttgctccaccactgctactgccatcagtcacttcccagcagctacccaggagcccaaaacctacccaaacacctggattatcactagcactaccagcatttgagcaagccacctggaggcccaagaatttgacccacttaacactggtgccagtacaaacagctctggggctggccttgctagaaacctagacatccaaatacaagaagctcaaagaacacccgggaaattcatcacaaaaagatcaccacctaggcacatagtcattaggttatctaaagtcaagaagaaggaaagaatcttaagagctgtgaggcaaaagcatcaggtaacctataaaggaaaacctatcagattaacaacagtttctcagcagagaccctataagcttgtcgggattggggtcttatctttagcctccttaaacaaaacaattatcagccaagaattttgtatccagtgaaaccaagcttcacaaacaaagatacagtctatttcagacaaacaaatgctgagagaatttgccactaccagcagaaactctacaagctagaagggactggtggctctgctggtcccagaagcctccaaactaaccctggggaatgatttaactgtttacaccccacataatgtggcaggactactgtactctagagtaaggctttggctaacagagagctgactccttaaatatcaggccctgctgttagagggttcccacatccaattaaagacttgttctaacctaaatccagccaccttcctccctgaggaaactggggaacctgaacataactgtgaacaagtcatagtacaaacctatgcagccagggaggaactcagggaaactcccctagagaagccagactggaccctcttcacagatgggagctctttatagaacaagggatccgcaaggcaggatgcacagtagtcattgactacctgctccaaggaaggaggcagccataatccccctgggaacacaactccattggcttaaatatcaggccctgttgttagagggttcccacatccaattaaagacttgttctagcctcaatctagccactatttgattctattgaatttgattctattgaaagtgtgtctcttcctccaggcacaagcgctcaattagctgagctaatagctcttacaagagcaattgaattaagcaaaggtaaggtagctaatatttacactgactccaagtatgctttcctagttttccatgctcatgcgaccatttggaaggaaaggcattttcttttcttttttttgagatggacttttgctcttgttgcccaggctggagtgcaatggcgcgatctcagctcactgcaacctctgcctcccaggttcaagtgattctcctgcttcagcctcccaagtagctgggattacatgcacctgccaccatgcccagctaatttttgtatttttagtagagacggaatttcaccatgttggccaggctggtctcgaactcctgacctcgtgatctgcccgtctcggcctcccaaagtgctgggattataggcgtgagccaccatgcccggcctggaaaggcgttttcttaccaccaatggatcccctataaaatatcaccaggaaattaatacattactatcctcagttttccttccatgagaaatcgcagtaatgcattgtaggggacatcaaaagggaacagatgaggtagctgaaggaaacagattagctgatcaggcagctaagtcagcggcaagaaagcctcaagacattaacacttcaaactcctctagtgtgggaaggctccatcagaggaattaaacctcagtactcccctacagaagcagaatgggccacttcttgagggtatacatttcggccctcaggatggtgacagtcggaggatggcaagctccacttgccagcctctagccaatggaaagtccttgaagtccttcaccaagcttttcacctgggaaaggataagacatatcaatgtgcccagagattgttttcaggagataacttactaaaaacagttaaggaggttgttaatgcttgtgaagtctgtcttaaaaataatccttaacaggcgactccttcctcctcaaccccaaagaataggaggttatccaggagaagactgccaaatagacttcacccacatgccgaagacaaagggcatccaatacctgctggtatggtcagacaccttcactaactgggtagaggcattcccatgccgtacagaaaaagcctctgaggtaataaaagtgtttgttagttaatgaaataactccccgctttggtctacctaggtatcttcaaaatgacaatggaccctcatttaaggcagctgtcacacaagggggtctcaaaagcactaggcatagaataccatctccactgtgcttgaagacccgcatcctcaggaaaggtagagaaaactaatgatatgatcaagagacacatcagaaaattaacccaagaaactcaccttccttgggtcactcttcttcttatggccttactacgaataaaaagtaccccttcaaaacttcgtcttagcccttttgagatgctgtatggatgacctttctttaccaatgattttctattagatcaagaaacctctgagctagtcaagcaggtaacttctctggctcacttgcaacaggaattagcacaattagcaaagccccaaccccaggaaattggaccacctctatttaacccaggagatttggtactggtgaaggctctcccttctctctcttcctaagcccaagctgggaagggccttacaccattctttcaactccctcagcaataaaagttacaggaatcaacttttggatacatcacactcgagtcaaagcctggaaagctgagggagcaacccctgacagcccagagaaatgacctgaatatcaatgcgaagaagtaggagaccataagctgaaaatcacaaaagataagtaacggagtaagaaccactcaccttagtctcgcctctacctcaccaaatactttttgccgtttctacctctccttttaagccaagtattactatatactatagcaccctcagggtgtaatatcgaacagaatctcaattactgtagcattttgcttaattactatccttacagcaggaataacagttattaaccaacagtaaacatgagtgttttactatcactaggtctgttaggattttttatgggacttagtaatacgtcacaccctttagctcctacaatatccgccatggcccatttctacaacaagactaattgttgggtctgtcctaaatggtttgctcagttcaacagcactgaggaaccttacaatgacccagaactcacagtcttaggattccctttgttggctttacttttaacccttaaacacatatcaggcataaatggaacatggtatgggagcactttcttttttttttttttcctcgagacggagtctcgctctgtcacccaggctggagtgcagtggcgcaatcccggctcactgcaacctccaccttccgtgttcaagcagttctcctgcctcagcctcctgggtagctgggattacaggcatgcgctaccacacccagctagtttttttttttttttttgtattttttattagagacggggtttcaccatgatgggcccggctggtctcaaattcctgacctcaggtgatccgcccacctcggcctcccaaagtgctgggattacaggcatgagccaccacgcccagccatgaatattgtggtggcagtcgctgtggcgggcacctgtagccccagctactggggaggctgaggcaggagaatcgcttgaacccaggaggcggaggttgtagtgacctgaaatcgcaccactgcactcaagcctgggcaacagatcgagactccgtctcaaaaaaaaaaaaaaaaacccaaaccgaaaaaccatatttattcattcaacaaacatttatttgcacattgtgtaccaggctgtcatacgcattagggatatagctttaaacaaaacagacaagatggaatatcctggaacacacattctagtaacaataaacaaacaaacaaattcgtaaatagcatgttagattgtaaaatgtactctggagaaaaagctatatggagaaaaagaagtgtctgtggggttaattttaattatggcagccatggagggcctcactgacagggtgaccgacgccaaagcgcctgaaggaggtgaatgggagccatacaaataactggaggaagaggtccctcaaccaaggcaagtgaaaaggccatggggcaggagtatgtcagcagtgttcagggaatagcaaactgtctactgtggcttcagaggaataagaagatggcgtaggatggggtaggagaggatcttgtaaatcattataaaagctctggcttttccgccaggtgcggtggctcaagcctgtaatcccagcactttgggaggcggaggcgggcggatccacgaggtcaggaggtcgagaccatcctggctaacacggtgaaacccggtctctactaaaaacacaaaaaattagccgggcgtgatggcggacacctgtagccccagcaactcgggaggcggaggcaggagaatggggtgaacccgggaggcggagcttgcagtgagccgagatcgcgccactgcactctagactgggcgacagagcgagactccgtctcaaaaaaaaaaaaaaaaaaaaaagctttggcttttcgtcagatgtgaagttattggagattatgtgtaaaatgtcataagaaagagtgacaggcttgcccagaagagtgtctggggaataaacttgcatggcaaaatgttagttttggccaggcgcagtggctcacgccagtaatctcagcacttcgggaggccaaggcgggaagagttcgaactccttgagctcaggagtttgagaccagtctgagcaacatagtgagaccacctcccccgaccgccatctctacaaaaaataaaagaacaaaattagccgggcgtggtggcgcgcgcctgtggtcacttgggaggctgagacaggaaaatcgctggagcccgggaggtggaggttgcagtgagccgacatcgcgccactgcactccagcctgggcaacagagcgagaccctgtctcaaaacagaaaacaaaacaaaatgttagttcttagaatcggaaacccctagtagaggcccaaagttgttttgcgaaaaggagactgacgaggaaacccggaggagtccgcccaaataggtggagagaagatcccgccgcgggcgccccctggtggataaaagggccgcgcggagggccgctctgctcttgagacggacacaaacggggcacaaaacactatactgagaccgttctgagggacaggcttccaccaaaatcgccaagggcggaccaggattttcaaaacggccgcgccgggggcgggaccaacccgatccgtaagtcagctgggcagcccggcgcccgcacgccgaccggaaggaactgctcggaaccgggggcggcgccggcgagatgacgcaaaaggggtcgcgccgagggtgacgcgtggcgtagacgacgccgtcggcctgcgcctgtcacccccctcctcccggggtttgtagcggaggaggagcgggcgccatggcggttctactggagaccactttaggcgacgtcgtcatcgacttgtacaccgaagaacggccgcgtggtgaggcttgagccccactcacctgtcgccggggcccccgagcttgtctccctactttcccttctctgcgcagtccagggcagagattggctagagctcgagcttctgggctgctggtgcccgcgactgggctattttattaaccggccttggctagaaaagtttttgtgacgggaattcgtttgagccttggcagcccttctcccgtattttgtgttggccagtccggtggacggtgcttgcggtcattaattgcctttgggagtgtgtgtgtggggcgtgtgtgtgtgtkattcgagctgcacatacaatacccatagcttttgtgcctttattgtgtttactcgtgagaggaacataggaactattgcttggtgtgtaatcggttaaatcttgatgaaggcagttagggtgtgcttggcgcagcgagtgtgggcataccgcttaggtggaggaggaagaggttgtctggagtgtggactgagccttcgaggcactgggctaagtcctgggcttggcttcttgcccccgagggtctgatttttccactgggggaagtagacacaggaacccattttagttttctatgtgttatggtagaagaatgtgtaagttgccacggaaaccagaagagggcggcttctttggtggggggtgggaagaagcaaagctagcgaatactatatagaacacttgaactagttctttcaaagatgaatgggaatgagggttttcttagcttggactttctttgtttggaattttctggaaacggcaagtagtttggtgtggctggaaggactggtgtgagtcgtggaatggtagactcgagtgtggtcagatacgcctaggtcagtcgtgaatagtcttgtgtgccctactgatgatcagagtccttgaagactttaaaagcaggattgaggcatggcatacttgttttgagaagataataggcagcggtgtggagaatgtatcagagtcaggaagaaactgagaccaggagagattagttacaaacagggtcctacccacatggaatgcagagcctatcaaagaaggtgaaataagttgcaatattgtacaataactacctcctgccgtgctccgctttccctcgcacgcagctattcctccctcctctccacctggcgaaaacactacaaactctcccgtaccattgttaccattcttttgctgtttcttctaaacaatattcttctccactattgtccttctggcaaacttactacttattatctaaatctcagatcaagcatcatctcttcwttgaagctctccctcctttctaagcagagttacctgagggttcctctgctgtgtcttaggtcttttataaaccacatgacacattttattttaacatttacctattatcctggtgttgtttacaagcgtgccctcgctcaagaatgtaaactccaatgagagcaggaactataccataattatcatctctatatcctgagtacccagtacaatgtctgctacttttagggcacacactagaggttcattatgatgactaatggatataaatgtgttgtattagttaggaccctttgttcaagtgatagaaacccaactcaaactggcataaacaaaataattggttgcctcataatactggggtaagcttggatcgagtggctggatcgagtgtttcaaagaatatcatagggaattttgttttttatctcttgattttgcttttctttgagttcctttgacgctctgcccatgtagagtagcacctggcaaaataaatgggcctcttttcccagagttatgaggaaataaaggggtgtagagctaccccacccaattaacaagcagtgggtctgcaaagataagcccataacaataagtccaccccctgtacatatttgtaagcatatgactggagatgtgcttacatgtgtacctgctatatttatactcacttatcaatctatgatcaacatatccagacttacctaccttccattctttcttccttttcttttttaactttttattatagaaaatttaaaacacagatgtagagagaatcatgtaaatgaactctcatgtccacatgaccagctttgtttaacagctgtgaacacatagccaatcttgcttcatttataatacccccacctccagtgcatctatttaatctgtaattacttcagtatgtatttctaaaatataacgtctctttaaaaaaaacaagaaaaaatggaactatgagcttaagtaccacataagtgacaggttaaaaaagaaaaaaaacttgacagggaaaagggaaaaatactaaaggaaagagaaaaagttgtaaaaaagaataaaaaaacagaaccacagatcttatcacactttgaaaaaactagcaataatttttagtatcatttaaactttcttattatctcataaacttctaaaaaatatggtgatttaaattaggacccaaagtccatatattggttaaaatgtctcatatatgttttaatctattggttctcccccttttttccttgaaaaaattttgagaaacaacctgggtgctttgtcttgtagaatttctcttgtttggattcgactgattatttactgggtgcgttaacatatttttgtgtcccctgtttcctataaattgttctttagcttcagagccttgattaggttccagtttaatgtttttggcaagaatatttcatataagatagtgtgtactttcagctgcatcacattcaggaggcacttgatgtctggttggctctgtgatgttaaaattggtcagtgggttaaggccttgttgcgcttataaattgttcccatcggattttgatgaaagacctaaagattttggcagccattgatgatcattgcctaaattcattatttttgtttctagtaaaaggaccacccctatctgttaaacatgaagcccagaaatatattcaagaaaaacaactgcaagactgatattcagcactcttcaacagctcagccccatcttatctctccagtcttttcatgctctattactgtgtaataccagactattacagaactttggtgttttggacctcccctaaaacatttaaatttccacttccaggccttttcatagtcttccagacctaaaatgctcacccttcactctctgctagtccagttcttttaatgcttgccttaaccttccctgaggttttctaatttccctagccagaaacaatcttttgaactcttgtggaatttttaaaactactttttttaccattttaaataagtggcacacatgttattaattagatatgcycagtatgtaactacttgtgttcagatgtaaggaccctaatttaatgtaagctttttgagggcagggattgcctcatatatcttactgtctgtttggtttctaacttagtgccttaagagcttgttaatgtgtctttccacgactagactgtgaactttttgggagcagggaccacagtttaatggcatttgtgatggcagtgtcaggcatctagaaggtactcagtaaatgtttattggataagcagattaacttgtatgagaaaggttgttcataagtgtatggatttttataaagggctgtttaactattatttaaaaaatgaccccgggtgtttgactttttcctaattgatataatccgtatccatttttatatattctgctagatccttttctactacaatatgctctttaagtgttcttttttctcgtaataaaatcaatccatcagtaaatgattgcttataagtgtcagttttctgtattagcccagatgccccaaaactcctattaaaggaaaaaaaaaggtaatttaaaatgttttttttctagacttattgcccttttattttattttattttattttattttgagatrgagtcttgctctattgcccagactggagtgcagtggtgcgatcttggttcactgcaacctccacctcctgggttcaagtgattctcctgcctcagcctccctagtagctgggattacaggtgcccgccaccatgcctggctaattttttttggtatttttagttgagacagggtttcaccatattggccaggctggtctcaaactcctgacttcaagtgatccactcacctccgcctcccaaagcgctgcgattacaggtgtgagccagcgcccggcctattgcccttttttatagctttggacatttgactttttttttcttttaatagtaatttagaaattacattttactgtggctttacttatttaaaaatgtgtttgtggattactgtgataaatttggtatttactttctttcagcctgcttgaatttcttgaaactgtgcaaaataaaatattacaattattgccttattcacaatgtacaggtgagttggtagatattagtcatttcctttgttattggaactatctaacaaactctgtgaattaacaaagaatcctacatattacagagggattttatcatacaaactggcgatcckacagggactggccgtggaggagagtctatctttgggtaagttgttttatttatttatttatttatttatttatttatttacttttaacctctggaagggcagaacaaattcttttattcttaaatgaggaaaaatataattgctcatgcttcaatctgcattttaaaatatggtttaaatttagattttttcccccaagttccctaaaaaaaaaaaagtaatattttgaattctgttggcatttctgtaaagaaataattgataaccctgtatgttactagtacttctgtatttcattttgagagtacttacatttataaccttatatgttttttcagccaactgtatggtgatcaagcaagcttttttgaggcagaaaaagtcccaagaattaagcacaagaagaaaggcacagtgtccatggtgaataatggcagtgatcaacatggatctcaggttaggaaatgagtaagaatatgagatttgcttagaaatgaaggactggaaggakcccacagagttattttttaaactatccagtaaggcttagagrgtttcaatcagaaatatgtgttaggggaaaaaatgcactttttctatattaaaaaatattattttcttcttttaaatgtaaagcattcctattgtgaagaattgagaaaatacagaaaagtacaaagaaaaacattacctacaactccaccatccgtgattatcactgttcacatttgtggctcatttttcagtatttctttttatttaattaattaatttatttttatgagatgtagtctcactctgtctcccagactggagtgcgatggcacaatcctcggctcactgcaacctctccctcccgggttcaagcaattctcctgcctcggccttccgaatagctgggattacatgcgcctgccacaacacctggcyaatttttatatttttagtagagacggggtttcaccatgttggccacgatggtctcaatcacgtgacctcatgatccgcctgccttggcctcccaaagtgctgggattacaggcgtgagccaccgcgcctggccgtttttcagtatttcttacttttttaaaaacattacgcagagtaccttctattcattgtcttgtttaattctcccaatgaccctgttaattctcccaatgacctacttgttagagtaggtacttctgttttctactatatacacatgaagttgagtcatggcttgtctaagtattttgttttattttattttattttatttatttagagacagagtcttgctctgtcagccaggctggagtgcagtggtgtgatctcggctcactgcaacctccgcctctcaggttcaagcgattctcctgcctcagcctcccgagtagcgggattacagatgcccaccaccacgctcggctactttctgtatttttcgtagagacagggttttgccatgttggccaggctggtctcaaactcttgaccccaggtgatccacctgccttggcctcccaaagtgctgggattacaggtgtgagccaccgtggccgaccaaaaaatactttattactaacaagtgcttctgatcatctgagccttcagtaaatcataatctttttgctggtgaagggtcttgccttgatgttgatggccgttgactaatctgggtggtgattgctgaaggttggggtgactgtggcagcttcttaaaataagacaactgactggcgtggtagcatacatctgtaatcccagtactttgcgggggcaaggcaggcagatgggttgagctcaggatttcgagaccagcccaggaaacatggtgaaaaccccatctccacaaaaaaatacaaaaattagctgagcatggtggtacagggctgtagttcctgcttcttgggaagctgaggtgggaggatcactagagcccaggaggtcaagggtgcagtgagctgtgattgtaccactgcactccagcttgggtgacagaccttgtcttgcaaataaataaataaataagacaacagaagtctgccatgttgatggactcttcctttcatgaaagatttctgtgtatcatacgatgctgttggatagcatttagtagaattcttttaagattgaagtcaatcctctcagaccctgctactactgtatcagccaagtttatgtactrtcctaaaccttttgttgtcatttcaacagttatcatagcatcttcaccagcagtagattccatctcagtaaatcacttggctgggtgcagtggctcatgcctgtagtcccaccactttgggaggctgaggggggcggatcacctgaggtcaggagtttgtgaccagcctgaccagtatggtgaaaccccgtctctactaaaaatacaaaaattagctcggcgtggtggcaggcgccagtagtcccagctacttgggaggctgagacaggagaattgcttgaacctgggaggtggaggttgcggtgagccgactttgcaccactgcactccagcctgggcgatgcagcaagactgtctcaaacaaaaaaaaaaaaggaagaaaaccactttgtttgctcatccttaagaaggagctccatatctggtcaggtttgatcatgagattgcagcattcagtcccatcttcaggctctacttctaattctcgttctcttgcagtttccaccacatttgcagttacttccttcactgaagtcttgagccactcaaagtcatccatgagggttggaatctacttcttcttaacttctgttaatgttgatattttgacctcctcccacaaatcacgaatgttcttaatgacatctagaatggtgaatctttttcagaaggttttcaatgtacttgcccatatccatcagaggaatcaccatctatggcagctatagcctcacaaaatgtatttttttttaatttttatttttagagatggggcctcactacgttgctcaagtgatccttctacctcagcctcctgagtagctgggactacaggtgcatgccacatgtcaggctgtatttcttaaatagtaatacttgaaagttgaaattactcttcgatccatggctgcagaatgactgttatgttagcaggcatgaaaacagtatttttttttttttgagacagattctcactctgtcacccaggttgagtacagtggtgcagtctcacctcactgcaacctctgcctcctgggttcaaacagttctcttgcctcagccttctgagtagctgggattacaggtgtgcaccactacgcccggctgattttttgtatttatagtagaaatggggtttcaccatgttgactgtgttggccaggctggtcttgaactggcctcaagtgatccacctgcctcagcctcccaaagtgctgggtttacaggtgtcagtcactgtgcacagctgaaaacaatattaatttccttgtacatcatatccatcagagctcctgggtgacctggagtattgtcaatgagcagtaatattttaaaaggatttcttattaaaagagcagtcatatttaaaaggatctttgttctgagcggcaggtctcaacagtgatcttaaaatatttgataaaccctgctgtaaacagatgtgctgtcatccaagctttgttgttccatttctagagcacaggcagaatagatttagcatcattctttttttttttttgagatggagtcttgctctgtcgcccaggctggagtgcagtggcgcaatctctgctcactgcaagctccacctccagattcacgccattctcctgcctcagcctcccaagtagctgggactacaggcgcctgccaccacgcccggctaattttttgtatttttagtagagacggggtttcaccgtgttagccaggatggtcttgatctcctgacctcgtgatccacccgcctcggcctcccaaagtgctgggattacaggcgtgagccaccgcgcccggccgatttagcatcattcttaacggccttgggatttttggtatagtcagtgagcattggtttcaacttaaagtcaccagctggattagcatgtaacagaagagtcagcttgtctttgaagctttgaagctaggcattgacttttcctctctagctgtgaaagtcctaagtggcatcttccaatataaggctgtttcgtcttcatggaaaatttgttatttcatgaagtcatcttcatcagtgatcttagctagatcttccagataacttgatgcatgctgcagcttcttttttytttttttttgagacagattctcactctgttgcccaggctggagtgcagtggcatgatctcagctcactgcaaccttcgcctcctgggttcaagcaattctcctgcctcagcctcctgagtagctgggattacaggcacacgccaccatgcctggctaacttttgtatttttagtggagacagggtttcaccaygttggtcaggctggtcttgaactcctgagcttgtgatctgcctgcctcggcctcctaaagtgctgggattacataggcgtgagccactgcacctggccacttgctgtagcttctgtgtcagcacttgctgcttcaccttgcacttttaaattatggagacagcttctttccttaaatttttcttttcttttttttttttttttgagatggagtaattcactgcgcctggcctctttccttaaacttcatgaattaacctctgctagcttcagactttcttttgcagctaccttccctctctcagcctttatagaattgaataaagttagggcttgtttggaattaggctttggcttaagggatcgttgtggctggtttgacctatgtagattactaaaaccttcttcatatcagcagtaagcctgtttcattttatcattcatgtgttcactggaatagcacttctaattttctttaagaacttttcctttgcatttacaactcagctattgtttggtactagaggcctagctttccgcttatcttggctttcaacgtgcctttctcactatgcttaatcatttttagcttttgatttaaagtaagagatgtgccattcttccttttacttgaacacttaagagtctcttgtagggttaattggcctcatttcagtattgtgtctcggggaatagggagcactgagagggagaaagatgggaatggctggttggtggagtagtcagaacacatacaacatttatggattaagttcaccatcttatatgggcacagtttgtggtgccccaaaacaattgcggtagtaagatcaaagattatagatggtaataacagatacaatagtaatgaaaaagtttgaaatcttgtgagaatcaccaaaatgtgagccagaaacatgaagtgagcctatgctgttgggaaaatggcaccaatagacttactcaatacacggttgccagaaatccttaattgtaaaaaatgcagtatctgcaaagtgcaataaaatgaggtatgccagtataagctttgtactttttacttagttttggtaacaagtgtctaagaattggtgcagtaaatgtggactcttaactttcatgtatttttttgtcagtctgtaactgatttcagtttgagttatgtattatttttatggtatttattatgtgtccttctttatagtttcttatcaccacaggagaaaatctagattatcttgatggtgtccatacggtgtttggtgaggtgacagaaggcatggacataattaagaaaattaatgagacctttgttgacaaggactttgtaccatatcaggatatcaggtatggttacaatttgctatctgaatgtactagaatgttttaatattgagatgtttaacacgtagtggtatggataggaacggtatgcataggactggtttctggataattctaatcccaaaaggtgaattaatataagactgtaagaatctttataataaaaaggactttttgtatttttatacttgtactaattatttataattatgtttggaggaattatttatttatttattttttgagacggagtctcatgctgttgcccaggctggagtgcagtggcgcgatcttggctcactgcaagctctgtctcccgggttcacaccattctcctgccttagcctcccaagtagctaggactacaggcgcccgccaccacacctggctaattttttrtatttttagtagagacggggtttcaccatgttagccaggatggtcacgatctcctgacctcatgatccacccacctcagcctcctgaagtgttgggattacaggaatgagccactgcacccagctggaggaattgttaatgctttaatttagttttttaattgagaagtagggcaaaagtactaagatttagacagttatattagtttacatcttaaagtaatgcagggtgataaatatggtatcactcaatgcaaaacagtaacactcattgtgaaagtatatctaggttagtaatatccatatgcaatatgggttttttttggccttagagataatcaagtaattttttgtaatctattaaaataaaataggattctgaaataacttcaatgtataacatttgatttggatttattttgtaaggataaatcatacggtgattttagatgatccatttgatgaccctcctgatttattaatccctgatcgatcaccagaacctacaagggaacaattagatgtaagtaaagccctcttatgattaaatgtacattcatattaatgatttgtatggatttatctttttcatctrttaaagttaattttttccgaattattatcttgcttaattatattcaacaagtttggagttctttttcttttccacagaggtactcatttttctagctgtcttctcatttctctaatttcctttcttcagtttcttttctactgagacaacctcagctctagaagcttacatgaacaccttgggaaagtgtttttcttgtcatcaaattaaactgttatcttgtgaggtaacttttcaactggggacactctggagccaggctagaacccagaaatttctgtgaaacagcgcagactgttcccccacatattttaaggtttatgtggcttcctgaaagctgaatttgtctttatggttgggattggtgcttaattgtcagatcatttctcttcattcagcagttagaattggataataaatagtgtccatataaatatttatttatttttttgagatggagtctcactttgttgcctaggctggagtgcgtggtgggatctcggctcattgtggcctctgccttcctcattcaagcaattctcgtgcctcagcctcttgagttgctgggattgtaggtgcatgccaccacgcccagctaatttttgtatttttagtagagacagggtttcactgtgttggccaggctggtctcgaactcctgacctcaagtgatccacctgcgtgttctcccaaagtgctgggattacaggcacgagccaccatgcctggcctattttgattttaacagaagcccactttggctaatattttagaattaatataaatcaattcttggaggtttataagtttgtctcagttgctgtccaattaattattaaaaatttttttttagagacaagatctcactgtgtcacccagctggagtgcagtggtgtgattgtagctcactgcaaccttgatcagttactgttttagcatgtttgatataactaagaataaagtatgtcttctatgtttctcagatttttttattctttaaatatatacatgagtaacttctgtcttaacagagtggtcgaataggagcagatgaagaaattgatgatttcaaaggaagatcagctgaggaagtagaagaaataaaggcagaaaaagaggctaaaactcaggctatacttttggagatggtaagataattatctttgttcaaattgttctgtaatatrtctaataatacttactgagtgtttatttctggctcttcagtagtcttaaaatgttaaaaattgagttatgatttttttctgatttaaatttggtatggcatagtaataaattggctctactgtgaaaataaatttgactctactgtcaatatagtgctaagtgcctttttaaacagtgggaagtggatctctaacttattaattgaatttcagttgtttaatattcatctcattcttaaagagtgtttagcaggctgaattttatgtatattaaagaatagttcttcactgtaccactcaagtgttaagattaaacagaatggtagttgtagggcaaaataatgggtggaaactgagcactctaaaatatactgcttctctgtattactaacaacctgaagtcatttggggaataataattcagtagatgattaattgacctacttggtattattttccatttcttatttttgtagaataggcatacctgtcatatcatagataataaatattggaatgaatggataataaagttactattttatataatagaactttcagatttgtagtctgttttaaagtttatttatttattattttatagagacagggtctcactctgttgttcaggctggagtacagtggtgtatgatcatagcttgctgcagcttccaactcctcagcttaagcaatgcccttgcctcagcctcctgagttgctgagaccacagtcacacaccacaatgccctgctaattttaaaattttttttgtagagacaggatctccctatgttggccaggcttaagtttatattaccatcaactgtctgaatgaacaaatagtaaasgctgtatagttcaagaaagctttactgaaattaaaaaaattaattgaaaatacacattttaatgagcacactgtgtatctcagagtattgactctgaacacccaacaccaagacaaattctaagagaattactacacttgaaagatatgttgaacaattgggcagaaagaataagttacttataagggaatgaatttagattgttatcagacttttccacagcaacactttggaagtttatgccagaagaaaatagattaacatactttttaaaactttttgttttcagataatttcaaatttatgggaaaaagtacatagaacttctatataccttttacccacattcaccaatttttaacattttgctacatctgttttatgattctctctttttctctctctctgattatacaagcacataaacacacattttttttctsgactatttgacagtaagttgcctgttatttccctttacctcttaatcagtgtgtatttcctaagagcagcagtattcaatgtgtataacaatatgtacgtattcacagtgtagttaccaaaatcagaaaatttagaagtgacagaaattacagtttatagggccgggcacagtggctcacgcctgtaatcccagcactttgggaggccgaggcgggtggatcacgaggtcaggagttcgagaccagcctggccaacatggtgaaactccgtctctactaaaaatacaaaaattagctgggtatagaggcatgcggctgtaatcctagatactcaggaggctgaggcaggagaatcgcttgaacccagcaggcgaaagttgctgtgagccgagatcgcgccattgcactccggcctgggcaacagggcgagactccgtctcaaaaaaaagaaaaaagaaattacagtttatattccaattttgccagttgttctaataatatcttttataattgtttcctcctccagactagaatccagctcgtgacttatcatctgttgcatttattttgtagaatattttcctttttttttttttgagacggagtttctgttgcccaggttgaagtgcaatggcatgatctcggctcactgcaacctccacctcccaggttcaagcgattcagctgcctcagcttcccaaatagctgggattataggtgcctgccacccacgcctggctaattttttttttttttttttttttgagacagaatctcgctctgttatcaggctggagtgcaatggcacgatcttggctcactgcaacctctgcctcccgggttcaagcgattcttctgcctcaggctcccgagtagctgggattacaggcgcctgccaccacatccagctaattttttgtaattgtagtagagacagggtttcactgtgttgcccaggctggtctccaactcccgacctcaggcgatcctcctgccttggcctcccaaagtgctgggattacaggcatgagccaccgtgcccggccaatagaatatttttcaatttaggtttatctactctttcctcatgattagattcaggttatgcacccacagccgaaatagtacgtgagtgatgttgtgtcctcagaggtcacatctggaggtgtacgatattcattggaagatgagtaattttggtcacttggtcatggtagtccactgcytggtgtctccaatagacaatctgtggctagacacttggagatctttcaaatgtcttgttccttgtcaaatttcccccataaatttctcagccattcatgattcctgactgcaccagttttgactctgctaagtgcaaagtggtaattatgcaaagtggtaatttcccacccccaccactttttccacaattaccaacctgcattctactgtaaggaagagccctcccttctttttttttttccgagatggagtctcgctctgtcacccaggctggagagcaatggcgcaatcttggctcactgcaacctctgcctcccaggtttaagcgattctcctgcctcagcctcctgggtagcagggattataggtgcccgccaccacgcccagctaatttttgtatttttagtagagacagggtttcaccatgttggtcaggcttgtctcaaactcctgacctggtgatctgcctgcctcggcctcccaaagtgctgggattacaggtgtgagccactgtgcccgcctgagccctcccttcttaactgcttatctatccgttcattatccgtgtctcatggattctttttttggctttgtttttaatagacaatttgtagagcaattttagaattacagaaaaactgaacataaagtacagagagtttctaagtactccctccctctttcccccagtcttgcattattgtgacacatttgttaacaattgatgagccaatattgatacattattaattaaaatccatgatttacgttagaattcaagctttgtgttgtacattcggtggaactgacaaatgtacgatagcatatatctacccttacaggatcattcaaggtagtttcactgtctaaaaaatcccctgggctccacctgttcatccccacccccaacacccacttcttggcaactactgatgtttttactgtctatatagttttggcattttcaaaatgtcatatagttggaattatagcgtatgtagccttttcagactgtcttctttcacttagcaatatacatttaaggttccactgtgccttttttctttcttccctttccctttctcctttccctttttctttttctttcttttctttccctccttttttttttttttttgagacggagtctcgctcttgtcgtcaggctagagtacagtggcattatctcggctcactgcaacctctgcctcccaggttcaagagattctcctgcctcagcctcctgagtagctgggactacaggcacgtgccaccgcgcccggctaattattttgtatttttagtagagacgaggtttcaccgtgttagccaggatggtcttgatctcttgacctcgtgatctgcgcgcctcagcctcccaaagtgctgggattacagcatgagtcaccctgcccggccctttttttaattttttttaatttttttttatttgagacaggttctcgctctgttgcatggacagtggcacaataatggctcactgcaccccgacctccagggctcaagtaatcctcctacctcagcctcacaagtagctgggaccacaggcgtgtgccaccatgcccggctaattttattttttgtagagacagagtctcactatgttgcccggcctgggatttcatttctttcttttttttgttttttttttttagagaaagtctcactctttcactcaggctggagtgcagtggtgctgtcatagctcactataaccttgaactgaggttgagcagtcttcctgcctcagcctcttgagtagctgggactataggcacacgccaccacaccttggtaatttttaaatttttttgtagagatggagtcttacccatgttgctcaggctgatcccaaactcccaggttcaagtgatcttcctgtcttggcctcccaaagtgttgggattacaggcgtgagccaccatgcatggctgatagctcatttcttttaattgctaagtaatgtttcattgtatggatgtatcacagcttgtatattttttacctgttgaaagataccttggttgcttccaagttttggcagttgtgattaaagctgctgtaaacatttgcatgcagatttttgtgtaggcataaagtttctatgcatttgggtaaatacctaggagttcagatgctggattgaatggtttagctttgtaagaaactgccaaactgtcttctaaagtggctttacattttacattcctaccagcaatgaatgagggtttcttttgcctcacatccttgccagcatttgctgatggtattttttggattttagtcactctaaaaggtgatcctgtgtccttttgattttattaacatattccatgttctgttttctaagaatatctgtttctcttactttattgcatttgtttgtaatatagtgataattcagctagtgttttgtaaaattagttttgaacctcatagcttttatgaatgttttaaatttcctaatagtattttaaagttagctttgaccaagtactatagcaagttcttttttgactcattaactttttttctcgtttgtgcttcctttctgccattataggtgctttggaggatttttactaatttgctctactccttctgtgttttgacactcttttttgttttttagaggcagggtcttactctgttttctaggctggagtgcagtggtgtgatcatagctcactgctgcctcaaaaactctggaacccaagcagtccatccaaccttctgaatagctaggactactcacactgccatgcctggctaatttttaaatttactatagagacaaggtcttactatgttgcgtgggctggtctcaaactcctggcttcaagagatcctccttcctcagcctcccaaagtgttgggattacargtgtgagctatcatgcctggctgtgatacttcttattggacataatgttgtcttttgatagacttcagaaacactgaggagatcttactggctgtgttgcttcttactgttttttattttcaagattttggggggaagggcatgtttatccaagaggagacactttacaggtgatcttatcagaaataatctctgaaagagtgtttgaatgtatgtataaagggatgttgttgccccatctaaatgtgatagagttgcatacatatatggtaaaactctgatgatatgcaaggaaatgactgaaaaaggaaaaccaaaaagcagggtatttgttgtctctgatgaggaggcacagggagaatgggataggtgacattttagttcttaagctagatggtagcatcatagtggtttttatttttatgctttatgacttacatgtactttacataaattcttatcctttaaaaaatatatcaaatacttgaaaaaagatgaagtaggggtaaaattggtctttgaagccagataaatgtaggttcaaatcccagctctgttgtttaccactgtgtggtcttgggcaagttacttgtttaaccttttaaatttcactttacttgtctttattttatttgtttatttatgagatggagtcttgctctgtcgcccaggctggggtgaagtggcgtagctcactgcaacctccgcctcctgggttcaagcgattctactgcctcagtgtcccgagtagttaggactacaggtgcacaccaccatgcccgtttaatttttgtatttttagtagaaatggggtttcaccatgttggccaggctgatcttgaactcctgacctcaagtatctgccccccttggcctcccaaagtgctgggattacaggcatgagctaccatgctcagccgctttacttgtctttaaaatggagattgcaggattgtttcaagaattagcgtaatagatctgaagctccaagcactgttcacacaaagtatgagttatttaaatattagctattaacactgttaagaataggaacagtgtagttcaaattttgaaatcttatttggatttcttttccagagcctgcagtttgtaacataaatttagatgttttaaggaaatcagcattgtgggattggataggatttagaatggaaactaaataggaattgatttatgtttttgtttgtttgtaatttaggtgggagacctacctgatgcagatattaaacctccagaaaatgtactgtttgtgtgtaaattgaacccagtgaccacagatgaggatctggaaataatattctctagatttgggccaataagaaggtaatccttagaattagtgaaagagatatttagaaaaactaggtatcagttggtggttttctaatgacatattttgatgattctgtgaattctaggcgaattttgtactggtgaatttttacaggtgagtctttggacagtagggaagaaaagtatatatgtgtgtgtagacatacatacatacgtgcacacacacacacagataaataattgaatctcccactctcaacacattttcaccctaaaacaggaaatgaatggaacaatttaaatctagttctgtaatactctcaacagccttctttaatatttaaaatatttatctcattcaactcctggaattaccagcaatttatgtcaaaattaatttaaaactaaattttctaaaatttttcttttggttagttttccctgcattaatgaaaaagtctatgaagctagtatttctgtgaggaaggggactattttgtaattgattaaaaagtattatatttagggtttccttttgtttcagggattttattttattttatttatttttgtttatttttttgacatggagtctcgctctgttgcccaggctggagtgcagtgatgtgatctcggctcactgcaacctctgcctcccgggttcaagtgattcttctgcctcagcctcctgagtagctgggactacaggcatgcrccaacacgcccagctaatttttgtatttttagtagagacggggtttcaccatattggccaagctggtctcgagctcctgaccttgtgatccgtccgtcttggcctcccaaagggctggggttataggtatgagccactgcgcccggcttttaaaatgaggtttttaaaatgagacttatgacacttggggcaagggacaagccaggtgctttcaacttcagcttattggccttttcacttggttattatggtatattagttctgtaattaacattgtgcttacagtgttaaatttgagcttgatttatattaaaattcaaaaatttcaaagcttgaacttaaacatttatatatgtatgagtatgcatacattattctacagtaatgttagatgttagatattctataattcgactatatttggactagaaaagtgttgtgattttaaaagtctttagcagtagtttacttttgccaaaggaaaattaaatatttttattcttacttcagtgcttaagggaatttaggactgtaggcctatataaggcacttagagtagaatttagataatttagttactgctctggtgaactacttttaaaaaagaattgttattaaatgaatttggaaaaataatctatgaatttaactttgccttgtagtaactgacttatttcttcttcagttttgaagagtgagagtgaatgctttcttccttttttttttttttaagtcacttttaaatactttctttcagttgtgaagttatccgagactggaagacaggagagtccctstgttacgcttttattgaatttgaaaaggtatgtcataatacagacataagtttggtatttatttgcttttatatggtattaaaatgtgaaaaattatagaactttttctagtttctagagttgccctttcttttggcactccccaaaattaagtttattgtatctatataggggataagttcaacatctgttgatgttaacatacgtacttttactttaggttcaggtgcaatctgcatgaaagtatctttagaactttttttttttttgagacagggtctcactctgttgcccaggctggagtgcagtggcgcagtctcgactcactgcagcctccgcctcctggttcaagcgattctcttgcctcagcctccccagtagctgggattacaggtgcccaccaccatgccctgctaatttttttgtatttttagtagagacagggtttcaccatattggccaggctggtcttgaactcctgacctcaagcaatccacctgcctcggcctcccaaagtgctgggattataggcataagccacaacactcagccaatcttagaactttttaagttctaagtaaagcccttcagagactcttaatttttccctgttacttaagtggagataaagttgagtaatagaaagagaactgaactgggtgttaagatttagatattaatacatcttttgttattagccagctattgtatgatacttggcagtttagttaaccgttctttctaggtcttaccttcttataaataaaacttgggtattagaatagatggccccttctagagctgtaataatgatagcttatgttgcttaaatatttactttaagctaggcattatgttacttttgctgcatttaatcctcacagttctgtaagatagggaccatccccttttccaaataagttaactgagacacataatgctaatgtgacttgttcaaaatcacacacctagtgaatgaatgtcatagctgggatttgaactcagatatgtctgattctgttcccattgagtttacactgtgctatggtatgctcttttttaatgcaactttggactcatatgtatccagtagtagctcattctaagttctaattattacaaagcatttatggaataccttttatgttttcagacacagcaataaggcctagggatacaagatgaatcatggagggttggggaagatagaccataaagttatatgtaggcactgtgtcagatgtaccagaaatgatacttacaaggtacattggtgccagcagaaagacctttacctttggtttgctgtgaaaacttgtagacctgcactagcattctatcattgacactatagaatctattatttattttctcacaaataaaatttcatttgtagcacatagactaatgactgcccatgttttgagttttttgcagctatgccattttcttcttttttttttttctttttatttttttgaaacagagttttgctttgtcacccaggctggagtgtagtcrcatgatctcagctcactgcaacctccgcctcccagtttcaagcgattctcatgcctcagcatcccaagtagctgggattacaggtgcttgccaccacacctggctcatttttgaatttttagtagatacagggttttatgatgttggccaggctggtcttgaactcttgaccttaagtgatccacctgccttggcctcccaaagtgctggaattataggcttgagccactgcacctgctgttttacttttttattgatctctaaggattctttatattttctggatgcaagctcttttttgattatgtgtgatacagatatcttctctgtggatttccttttactttttttttgttttttaagggacaggatcactctgtgttgcccaggctggacttgagctcatgggctcaagtgattctccaattttagctcctgcataactgggaccacaggcatgcctttttcctttcttaatggtgtctttttataaacaaatttctaattttaatggttcaggttgtcagtatttttcttcctttttagtggcctatttaaaaaatattttcctacttcaaagacatgaggatattctcctgtattatttttagaagctttgttgtgaaattgtttcccattcaattctgtaatttgcttttggtgtattgtattacattgtttcgtttttcatacattggattgccacgtgacagcaccatttatttaaaaggttgtcctggccaggcgtggtggctcacgcctgtaatcccagcactttgggaggccgaggtgggtggatcacgaggtcaagagatcgagaccatcctggccaacatggtgaaaccccgtctctagtaaaaatacaaaaattagctgggcatggtggtgcgtgcctgtagtcccaactactcgggagactgaggcaggagaattgcttgaactcgggaggcagaggttgcagtgagccagcatcgcaccactgcactccaacctggcgacagagcaagactccgtctcaaaaaaataatacataaataaaaagttgtcctttttctctgaggtctctactgatgaaaaaaataataaaaaaagttgtcctgccccacagctctgtagtaccacttttgttataaatcggtatccatatatgtatagagtctgtttctagacgctatactgttgcactgatctatttgtctattcatataccactgttacattgtgttaatcactataggtttataaatgtcttgataactgtgagtcttccaactttgttgtttttgaagattgtcatagctgtttttgacttttgaatatttatttttgaatcagtttctcaattttgaagagatttattaactattatttaggtgtaagtaaattgagtatttgcaaatactatcctcctgaaaaagtgatcttcagagctttctctttggggatatagcatggtgatagaattatacctgcctgaaaataatcagtcagattcatgaaacgtacactgattgcctacgttttagataccatgccatatgatgttctaaatgatgtagttacaaagacgaatcaagctttgtctatatcttcatggattttataattcatttaattattgacatgtaataaatatgattataactattttatctgcttctctttggattatctctagtaagaataagtttccaggaatgtaaaagaaaattggtcagtactgagttgaaatatgtaactgtcagtgtcagaaacagggatttagaattgtgaagttactgacaggaaggattcttgtgtagcacagagcttggtattacagtctcacagttcattatctaaaacccttgagaataactaggcttcctaattcagaatttttcagaattcagaaaggtaatactgtatatatgcatacacacatacacattacatctgtgattatgtaatacctttctgggtcagcattccataatctgtcacaaaagtatttctgcagtgaaacaaatgaatattcatactaagtggataaaaaaaggtcataacctaccattaggtttggtgttactgccaaattaattttaacaacaracttaggaacacaactttcactttccaggatgtttttgaattttgagtaaaaaggattgtgaacytgtataatacagtcagtaagtgtatatttatctgttcactgcagttggactgtctctctaaaatcctggctctgacccttgccaacaacttctatacttctctaaacttctgttttctcattaagaaaatggatagtacctcatggggttgttaccagaggtatttgaggtaatagatacaaagcatttaacagcatcgggtgtgtaataagtattcaaacattaatttttgtaacaacaaactttttgtattttcagtattctagctacagaaatcttttccataaagatttatgcttgagtttttataattattatcaggaagaagattgtgagaaagcattcttcaaaatggacaatgtgcttatagatgacagaagaatacatgtggattttagccagtcggttgcaaaggttaaatggaaaggaaaaggtatgatggtttatcttttgtttttgttctgctttttttttttttttragatggagtctcgctctgttgcccaggctggagtgcagtggcacgatcttggttcactgcaacctgtgtctcccaggttcaagccattctcatgcctcagcctcccaagcagctgggattacaagcatgtgccaccatgcccagctaatttttgtatttttagtagagatggggtttcaccacgttggccaggctggtctcgaactcctgacctcaggtaatccaccgccttggcctctcaaagtgctgggattacaggcgtgagccactgcgcccggccttgtttttgttatgcttttcatgcttgtatgagccttttattgagtgctgttaattaggagaaatattaattgatgtaactcctgccatttgtaattttacaaacctgctatctagaatctgaggtagagtgtgtgtgtgtgtgtgtgtgcacacacatgcatgtgtgcacctgtgcgtgtattttaaactgatgaaaaattatattttctatgtttgactatattataaattactaataattacccactgcagacatgatatgtttccaaagtaattattttgactttatggtgttttgagtcttttaggtgcacaacttaaattttttttgtttgttttagttgtcatatgatgcaaaatagaaaaggtccatggaaaggtagataaaagtctcattcattcctgctcctcatctatctaatttctcttccagggtaaccattatcacctattggtactaactttcccctacattttttgaatacatatgtgcatatatatatatatgattttctccttttaaaaaggaaaatataaaacaaaggatgcaggctatacatactgtttttgtaccttgcattttttaattaacagtgtatctaagagatcagttcatatcagtatataaaatgaaccagccctgttaatgggttttctaaatttttactcttccatgtccatagcagtatgttccacctttgtacatattacatttcccacatacacatacatatatgtcaaatacattgctcgtagcatgtcagtcttaaaagttgggtctctcatatgttgaaataatacgagtttttggtttttgatgcagtgtttttaacaggtttcactttgatagttactcacatgtaatgctaaattttactgggaatttcagggttactttctttttctataacacttatttcccatgcttttaatgaactgttttttttgtctgtttttagtaagaaagaaaaacactatttagttgtgaattgctgaattgtttggtggattctgttaccttatgggagttcagagaaggaagaaattattaatgtgactaaagtaggcaaggaatgttgagtggaagctgtgatctctgtgataaaggagagggtgacttggattggagttccatgtactattagtttctcctgtgaaaccttacctcctcctagaacacatggctagtttttgacagtgctgtttgagtgatttgtgaaacctaaattgaagcactaagatttttttccacatatgaaaattacaactttgtgaatgaaagattccagtaagtatattcaaagtgttggtgagctgctggcctgatgcagtgtagttctggccagtagtaatgccaggtggctcttatgtagagctctgcttccaaagagctagtttaattgtatcatttgggaagtgtatgaaataaatattataattcctcattatagatatggaatttgaggcataatcttgagaagtgatttacctagagtcacatacacagatgatttagacagaccctacatttggtttgttttttaccctctcaatcctgtcttcttctcaacccatccacccattgaataaatactactactttcttgtgacttttaaataaatttcttcatgttttttcctaagataaaatgtcacataggagggagaagctttggttttgtatatgcyatcataaacatacagtttattattctcagttaattttgagataattatatatgttattgattcacatttataaacttaatgtgtataatgtgccattcacagcactaagaactttcctttatagtctgatgattccagcaactctgtgaaatgttggtattattttcagtttataaatgaagataatgtaaataaagataatgaattgcagagaagtggtgtcttacctaggacctcccactacagtcaagaacctcttacattaatctggtgccctttctgttatacggtaactgcttcatccatagtgagacttttaatggcaggcagatggcaaataatttttcaatgataaatgatggctgtttgttaccattaccagttattttaactcttgcagtagactgtttcacatttatgggaaacattgctggccacttttgtttctggagtctctggaattgccaaatagattgatcttgtcttttttgcttaccctatgggtccccctttaaaaccctgacaatcaaggtacacataggattctcagtcaaaacctctgtctgtacctccagtttgttttacttctacatttaatctaggacccttctgtaggaagcctttctacaaacagcatttcctagtggtgtggttgagggataggaaaggcagggcagtcaacaggtctgggacatggatgcgaattgaattctcatctggtaggagacttgaaaattgaattctcatctgataggagactagagttgagagtagagaggctgcattgaatgctcttcctttctagccctaccaagctagttaggatgtagcagtaggtcctattttcctgaggggatttttggcacttgggaggaatgaagttgcccctaagttagaatttcaaagtagagacagtttgtctttggtgctattacccaccctctcctctcacagctgtttggtgatcttctgcacatcctgccctcttctatttgcctgatgctctgttgccatttagcagagtatctcttgttaaatcttttttttttgaaacggagtttcgcactgtcgctcaggctggagtgcagtggcacgatctcggctcactgcaacctctgcctcccaggttcacgcgatcctcctgcctcagcctcccgagtagatgggattacaggcacacactatctcgttagatctttaaaaggtctcttaaagtctcacttctctcaaacttaggtctttcagatcttaaactcaggtcccaaatcctcagttttccactggacttaatgttctcatgggctcaatggctctacttgaacacggcatttgtgtgtaatttatttgaaagtttgatgttgtaatattcacatatatcgttaggtggcagcatgtggctacctagcaaaaatggatgtctgatttcaaattagtaatggagatggaattactatgattcttttgttccctttctctgtctctcgatatatgccatttataaaatagctcttatgctttttataaaataattattgttcttggttaggtggttkttttactaagctctttttttcttttcttaataaataggtgggaaatacaccaagagtgatttcaaggagtatgaaaaagaacaggataaaccacctaatttggttctgaaagataaagtaaagcccaaacaggagtatccttaccaagaatcagttagttaatatgtattgaccatctgctatgtgtagagtactgtgtgatgtgttatgaaaagtcacaaaagctatagaagacaaatttcctgaatccagattgtttgtgaggaagtaacttagtttatcattatctcttttcaagatcttacatatactttgctttttcactatactctagtgtatggagaaagttaaggttgaaagaaatctgtagcctaattcttttattaatactttcctactctaggttaagtactttcctacttatcatattctcagaagatcttcaggtaagatttgtattttctttttgggggggctttcctgcaaaaaccggaaagcctactagacaaattctaaaagagctgtaacactagctttgtattttctatatgtaattgtaatgttttctattcctcataatctgaaatttattattgctaagctgattcctttgtgctacctgctgttatgtttaacttccttacctagataacaaaatcctattgttctctgttacaatgttaggttacttctttcggtatagtatattgtaatttcaacaacaaatatttattgggcttctactgagtgcaagagttcacttttgtaggattaaaaagaaatccattgacttgaccatttacttcaggttcttccaagttttaggttgagacatgtaaaaagtaatgaaacatactgtttatattatgacatttaaattggttcactaatttttcccattataaatatatcactccacacattgcaagagttatttctgttgtgattctttctggtaaatggtgtctttgtttcctagtttctattggtatttcagggatttttttttctacatatgtagacatttcttttccaagtactcatcaagaaagatgaatatcaggttgacctggtctatattcatgttttaagatgtgttgattgtctgcaatgtataaagcattgtgaggtgttagaactggataaagtctgaagaaagctgataaaatcagcataaggagaggctttcacatgcagacagaccaaataagaagctgagatttggtcagaaaagatcaacattcaagggcatatgattgaaagctcaaaatcataaaagttatgaatggaatacatttgatatttatttaccaaatctttgaaattaaatttaggcttattactaataactatagctggaagaaggggaattttaagttttctttaattttaattaattgaaacaaccacacatatacttatatggaatagtgtagcttctagccttttgaagttgatgcaaaagagagaaatgctgttaggggatagtctgatgtgcagataaattgtcttaagtcagttaagaaggcatggtggcatctactttatgggccttaagagaaagagaaattagtgaaagtatagattattaataagaagaatcaaaaatagaagtaggagaaggaaataacttggcccaactagacctcagggaagaaattggagaaaagatggcagtgagctcacaaatttgtgttttattcaaagggagagggatttgatgtcttctgaaagtgttgattttagtgataagtacaagatagtgggtaagtgaggaagcaggagatacaacaagtgtcttgagggtatgacaagtaatcaacagatacttagtaagcatctgtcacatactcagtttagcaatgaaagatattcagttcctgcccacatagagcttacattttgctgttggagtggggaaaaaaaaccagacattaaataattaccattctaaatacgtctaaattattgcaaataaatattgcaaagagatatgggactcataatagggggcgagaggttagagaataccctcaacactgaaaaaagtggcattaaagctgtgacactaatatgggagataggagggctgaggtggagtgctgtcttctttcgtatgatccatcatttaagaaataggctgggtgcagtggctcatgggagtgctgtcttctttcgtatgatccatcatttaagaaataggctgggtgcagtggctcatgcctgtaatcccagcagtgtgggaggccgaggtgggaggattgctggagcccagaagtttgagagcagccagggcaatatagcgagacccggtctccattttttttttcttaaaaaaaaaaaaaaaattggctgggtgcagtggctcatgcctataatcccagcactctgggaggccgaggcgggcagatcacccgaggtcgggagttcaagaccagcctggccaacatgcagaaactccgtctctactaaaaatacaaaaaattagccaggcgtggtggcggatgcctgtaatcccagctactcgggaggctgaggcaggagaattgcttgaacccaggaggcagaggttgtggtgagccaagatcgcgccattgtactccagcctgggcaacaagagtgaaactccgtctcaaaaaaaaaattaaaaaaaatacagtttttgtcttaacccaatacagtcacagtacaaacattcacacacacacacacacacacacacttgaaccaaaagattaataaaatmaaatttttttaggcatatactgtatttctgtttttttttttaaatgctgttgtggcccactaaatagattttataccccattgatggattatagtcatcagtttgaaaaacattgctctgagccaggcgcagtggctcatgcctgtaatcccagcactttgggagactgaggcaggtggatcatttgaggtcaggagtttgagaccagcctggccaacgtggcgaaaccctgtctcgactaaaaatacgaaaattagctgggtgtggtggtgtgcacttgtaatcacagctacttgggaggctgaggcaggagaattgcttgaaccctggatggggtggttgcagggagccaagatcaggccactgcactccagcctgggcaacagagcaagactgagtgctctgaagaatttggacagagggagcagcatgtgcagagcacacattaggatgaaatcataggtgggagctatggaatgtgtatctggaaaaggcaagatccagaagatgccccggaaacagagtagcatagtgaaaagagggaagttggagataatggagtcataaccgaatggtacgagctgactaaccctctttagccatctcatgggaagctaggaggaacaatgtctttcatttgatcttatgtagaagtgagacattcctgtggaaagtgttgagttgtggctttgtgaagcagacacgagcctctagtcctgagggaagtgtgtctgcgtttactgtggtcccacatgtaattagcatagctctgcctgttgggcttcctcataacctttctctggaaaaccaccattccagcccatgtcagtcttcctcaaaatccacctttgaggttgagattattttcagcagaaatcgtaactcttttatattttctcttattctattatagtatatttaagaaaatacttatctctgaattaaaacattaaaacatttttaacacatttagatgaaatttaaaaagattcactcgtagcttcatcacctagacacatgatactttttatttctccttgtttctttcaaacctttctcttatgtaaagttataatcgttgtatggtatatgttgtttttgctttaagcttttttcatgttaattttcataaacacctttctagggttttttctgtagcatttatcgttgttgataacttcatttataatattgtatcttgttgaagtactataatgcatttaagtatgtctttattactagatattttgttgttcctactttgctactaaaagtaatactattatgcatattttttatatgtrtatatatatatatatatatatatattttttttttttttttttttttttttttgagactgagtccccgctctgtcacccaggctggagtgcagtagtgcaacctcggctcacaaaagtctctacctcctgggttcaaatgattttcctgcctcagcctcccgagtagctggggttataggttgcgccaccatgcccggctaatttttgtatttttagtagagatggggtttcaccatattggccaggctggtctcgaactcctggcctcgagtgagtcgcccgccttggcttcccaaagtgctgggattacaggtgtgagccaccacgcctggcttttatgtatatttttgttcatttaactgtattcataaattcttattagaatttaaacatgatgggcaggtgtggtggctcacacctgtaatcccagcactttgggaggccgaggcgggtggatcacgaggtcaggtgtttgagaccagcctggccaacatggggaagccccgtttctactaaagacacaaaaaattagtcaggcgtggtggcatgtgcctgtagtcccagctactcgggaggctgaggcaggagaattgcttgaacctgagaggcggaggttgcagtgagctgagatcgcgccactgcactccagctcgggcaacagggcaagactccgtctcaaaaaaaataataagaagaatttaaacatgataactcgatatgcattgctgaatttcctcttgattgaactaaaagaagagacatacaaatgtacctgttatcttatatagcttttctgggcattggaatttataataattttttctagttaaagatgtccctcattttctaaatttaaattttttaaattattgacaaatacgtttattttttcctcctaatttttttgcctactagtctttattttaagattgtttaggattaggattctttccatttctcctgactatataatgaaagaaaatgttagttttgttttagaaatgtactatattcttttgagatgctttttgctttagttacttttagccttatgacctcctttgtttaccagatcttaagttttgatgtcttaccagtattatttatcacatttatccttaactaactactgcagtacaaaatacgatcttatattagatgagcaggccgaagactcaaaatcaagtcactcacacacaagtaaaaaacacaagaagaaaacccatcactgttctgaagagaaagaagatgaggactacatgccaatcaaaaatactaatcaggtacctctaatgtccagacttagaygtggagaaataaatattttatccctctgtaaatgatgtcttagtgatataatttaggaggtaagggatagttctaagcagagatgggtttgttcctaagaagcagaatggttgcactggggtatgggattttaattttcaaaaatatttatcacaaatgataaaagatcatttttgacataacttaatgtatcaaatacttccacattgtgaagcaagagtgatttccgtacctgtggatactcctttattcccatcagaaacaagtgtggttgtgctgaaaaagattttgtcatttatctgcttaatttatcaccaagtgttatgtatagcacttaagggctcttgagattttacatcctataaaacatttatatcctgctgtattgtatataagaaaaacagcactggtaattaactttagcatgctaaaagctctcctgaacagcacatttaaaaaaaataataaaaattccccaaagaaaatttattgtgaagaaaagtgattatttccagcctgtgctttggttcttagttaaataaaaagcaatttacaggctgggtacggtggctcacgcctgtaatcctagcactttgggaggccgaggcaggtagatcgcttgagcttaagagttggagaccagcctgggcaacatggtgaaacccccatctcgacaaaaaatacacacacacacaccttgacaaaaagtacacacacacacacacacacacaattggccaggcatggtggtgtgcacctatggtctcagctacttgggagcttgagaggatcgcttgagcccaggaggtagaggctgcagtgagcccagatcatgccactgccctccagcctggatgacagagccagaccacgtctccaaaaaaaattttttttttttttttacatcagagctccttgcttttgttttaccacatagaaacatttatgctgggccctggtggatgagaaggatttcagtgggctgaggtgagaagggagggaatttaagatggtgagaatgttaaccaaagatgcagaaatagagaaatgtagtatgataggcagagtcaaggatttgctgtcaggagagctaggtttacatactgctggccatcaaagtgaccttgacaagttgtttaactttctgagccacagtttcatcctctgtgaaaagtgagaaatacttcacaggcattttgttaagattcagtgaaaaaaatgcgtgtgcaaacattttctacactggttattattgttactactttttttttttaactgttaaagcaaattactagttttagagttacttggaatagtttctctctgtggttatgacattaactagattcatatttcagttaaagtgtttcttttctttcttttttttgagacggagttttgctcttgttgcccaggctggagtgcaatggtgcaatctcggctcactgcaacctccgcctcctgggttcaagcgattctcctgcctcagcctcccgagtaggtgggattacaggcacctgccatcatgcctggctgatttttgtatttttactagagatggagtttcaccaagttggccaggctggtctcgaactcctgacctcgtgatctgcctgcctcagcctcccaaagtgctgggattataggcgtgagccaccgcgcccggccctgtttcatttttatttatttatttttaatgttttaagggttgctttaacaattttttgttttgtagttttaaaaactgtttccaaagtgaaatctacaaaatggtacatttagagaacctagcttccattcttgttccctccccttttccttcttccctctgtgggtaactattttatgtgttttatgggttattgatttaaaaaaatttagcaagtaaatatttgatatatgtagttagctctttgctataatccagcagagatagaatttcttctttctatagccctttagctgtttaaagattgccatcattcatgcctcatcccgttttcaggccatacttttgttggttcctgcaaatatttctcacatgaatcggtggtaataaaagtagtagtaggccaggtgcagtggctcatgcttgtaatcccagcatgttgggaagctgaggcaggagaatcgcttgatcccagagttcaagaccagcctgggcaacataggaggccctgtctctataaaaattttaaataaaagaaaaaagtagtagtagttaatattttttggtccttacaatgtaaggtgggttcttttatccccctttcacacaacaaagtgagaacaaaaattgttacttgcccatagttttacacagctagtaagtagtggaaccacagtttagtttcatagttgaaactaactactcttaacttgaaacatactcctaactacttttgctcgtcttcttacctggggtatattctcatcagttttctttcctaaactctaatgttattttaataaaatttgtcccatagtataatattccaatgtgatctaataggaacacatctcctccttcttaaatgtctgtactctattactttagtctgaggtcgcatcagtcttctttactggtggctgtatcacattcctgtgaatgtttagcatgttttccactaaaaactctgaattctttccccctccatgtgctgcttttagctccagcttttcatcctgcacttgtacatggaaccgtccatgaatttaagcctgagataaataaacattggtgtgtttgagataatcagaggtctaaaaaatttcagactggttgtgttttttttgtgtgagtctttctgattctgctgtttgattacttgaaaccttacagtagcaaatatccttctcattttgcatggagtaaaagcatcaagattttgggggaatgctattagtatttttaaaaagattttaaggcaattttaagttgaaattttaaggcaatattaactataaaattattaaattctgaataatgatctcctaacttctccccttaaagtatattaaattttaaaaagttttgtactttgatttaatgatatagctacattaattttctcttcttcctaataaaactcagcatcagtatttaagattttaatggccccccgattttttattattttgttttttattttttaaaattcattaaagagaattttcagtactagacaaatttcagctatagttcatattttcctgtttgtcggtgttttgcttagtgagtctggtttcccaagagtattttaacttatttcttcaaattctttgttttttattgagtaactagccttactaatcaattcgaaaacgtttgtttaattttccacctcatgtcttaattccagagatggtttttgtgttgttgaggtttgggttttactggggttacaggaaatgcgtattcagctgggggttgccttgctgagaagtattcatgctggttgtcagttttccactggggttttcatagtgtttgtattcttgactgtactttttctgtcattttagtgatttaatgttatcttggtgactaagatttaaccagatctttgatttagtcccagagacttgagcaaggatagcttttaattagattagactttttttgattgcttatttcaagtcatttgctaggttaattgctttaaattggccattttgtgttcttcgttttttcttttctttttttgccacatggtagtttaatcatcttgtcttatgttttaaatgtataaataatataacttttaaaaattcatactggaaaggacctagaccttatctaattcatttatctcactttagatatgaagatactgatcccacaggcccttaggcctttatagtgggagagctagaattttaacatttatttggttcagtcaggtgttggattttttccccattattctgtaccactcccccctttttaattttggatgtcaagttaaattatctccaacctgtgcagatctcttgagtctcagtttccctatttctagaatgaggatattgcactcctaaagctcttagcactgtgttagcatgtacttggaggatctcctcttacatggcttcattcagccactttaacttttccccttcatacatacagggctcatttttccttgcttttcagttttcacttacactactttcattagccttcttgcagcccattcagacccaagctcacttaccctttgaggctcatctgaaatcctaacttctccatgaaaccttctctaattattctaaccttaagagtacttgtttgacacatctcctaaatgtcaaagactatttgaacccagatctacctgacttcaaagcttgtgtagctttgaaaactactcccgagtaggagtgattttaaagtttcagtccaattcaaatattcagcttcctcaaatttttaaaagaatgaagtgctacataatcttttatctcttctattttaaatactcaaagcacttaagtgcccatttgtataataacatactgaggattttataaatttatacatcagccagcagtctcggcattttaaaagtttgtctcaaccaatacagaaataagtacaagatgtacagatataatagtatatgaatatttctattttgtatatgttataggaagcacaaaaattcttttatctcagaatgtcatattttactagaaaattgatggcaaaaggctaaaccaaaatgcctactcattttttctacctcagggactcttataatatgacaagaactattgggattgtgtggaaaatcacaaatcagtttataatactgtattacacagtgtgattattactataacaatcctgttacatctgttttcacacactgtcaaactcaaggtgtacagtatctagacagtatatggaataactaataatttgcttaaaacccagtccttaaccatgggtattcatcactctgaattttaagccttgacatttatgtctgctacagtggtatctggtgatagagttgagacccttgggagtttagtccttagaattttcctttcctttgggcagtcttaagaaagttaaattttacaaagtatctcttgaaagagcattggctgtggtctaagagtagaattaaatgtagcaattttattatctttggggcaaaggattctaccagtgtttaaaaactcattttaaagaaatataataattttgacataagcctaatcagctgagtgaggtggctcatgcctgtaatcccagtactttgggaggccgaggtgggaggggatcacttgaacccaggagtttgagaccaccctgggcaacatggggaaaccccgtctctacaaaaaaatacaaaaattagccaggtgtgatggcacatgcctgtggtctcagctacttaggagactgaggtgggaaggatcggttgagcctgggaggttgaagctacagtgagccatgatcgtgccactgcattcctgcctgggagacagcaagaccttgtctcaaaaaaaattctcctctctaacttctgtctttctaaacatggaagatgtatttgaacatctagagaggagctgttataaaataaaacactttaaaaattaattgctcagacccaagtatacattatccattttcttttttcgagatggagtttcgctcttgttgcccaggctggagtgcagtggggcaatcttggctcaccgcaacctctgcctcccaggttcaagcaattctcctgcctcagcctcccgagtagctgggattacaggcatgcgtccccacacctggctaattttgtatttttagtagagtttctccatgttggtcaggctggtcttgaactcctgacctcaggtgatccatccacctcaacctcccaaagtgctgggattacagacgtgagccaccgcatccagcctccattttcttatttaagacttactgacttgtctaagatctcttcctgctaagttatttcaatgatatcttcttataggattcttatgggaattttagtagtttcattgcagatcaataatgggaccacgttttgggggagtgaagggtggggagctgggaataagactatacataatcagaatttttgattttgcagattgctctagagacatgttctgatttcagttgagctatttcagttccatatttttgaagctgatccttcgtttcagccaaaatagtagatacaaatcaatgacgttgttaaacctttttctgaattattttattgctttgtaatttacaagattcttgacattagtggtagtgttcacatttaagctgttataacagccttctaatggyagacttttctaagttttattaattgaaaatgcccacaaaatgattattttactgattcacttgtaattcccccttcctttgacaggatatctatagagaaatggggtttggtcactatgaagaagaagaaagctgttgggagaaacaaaagagtgaaaagagagaccgaactcagaaccgaagtcgtagccgatctcgagagagggatggccattatagtaatagtcataaatcaaaataccaaacagatctttatgaaagagaaaggagtaaaaagagagaccgaagcagaagtccaaagaagtccaaagataaagaaaaatctaagtatagatgaaagatgaagaggcagaattgagaggctaacatatttactcttgtctaacttaagagtgccaggaaagcagatgcttagattttgtgtcaaagcttgttatttttttcatactaggattatggtctttagattaatactgattatatagagcacggaaagataaagaattgaacattttctttgtatacttttttacactaattttattgttatacataaatggtagtcttcatttttgaagtcttacattttcactctttttttaatgaagtatttcatactacaaaaatacataaacgtatatataaagggataataaatgtaaatatctgtgtactcatcagccagcttaagatacagatgttgtcgacattttagaagttccctaaggccctctccctctcaaataattatttggaattttgtgtttgtcatttgtctattatagttttacaacatacgtatgtatctgtaagtgaaatgttaattttgtatgtttctgaattttatataaatggcaaaatgtttacttctgtgactttctttcatttttattgctatatagtattatataaatatactacaacttattcattcttgatggacatttgagttttgtttatttgtttttgctgttgaaacaatgctgctgtgaacattgtatctagcagttatattgcttgatatattgataaaataatgccaaatttgtgttctgaagtgactgtactagtttatacctctcttggcactgtgagttacctttgtttcatagcatctccaacacttaagttcagacttaaaaatttgccaacctagtggatgttaagtggtatctacctgtgatttccagcaagattactgttatctctgctcttccatgtgtaagatgtcatttttttcctggctgcttttaaggttttctgtcactggttgtaagaagtttgattatgatgtgcttgctgtagtttttttttcacgtttctgctgctgcagctattttacctgtgggtttatggttttcatagaatttggaaattggggggcattttttcttctgttatggttttctctctgctcctctcatgcttctcctggggctctgatgacttggatgtacgttaggcccctcagaattttctcccagtgtgctgattctgtgcagctttttaaaaagcctttttctctctgtgtttcatgttgggtactttccagtgctgtgtcctcattgtttattaatctttctgtctaaagtatctaatttccttttaatcgtatccaggtatttttcacctccgacatatttttagtctttagaatttctgtctgggtctttatctcccatgtgtctccttcacatgctcatgccttcctctatttttttttttttcaacatctggagtgtattgataatagctctttcagtgtgcttgcccattctgtcatctgcatcatttctggtctgtttctattgattgattcccaccctaccccaacccccaccctgcccatattggattgtaacttccttcattacatgcctggtaatttctgtttttaatattgggtgctggagttcttttaagtatcttgaactctgtttggggacataaagttacttggaaacaatccgatcattttatagcttgcttttaagcttaataagacaggactgggacagcctttagtttagggctaatttgacccactacgaaggtaataccgttctgaataatcttcctggttacacggtttctgcattctgtctgttgggaacatgaaatattctgaaccctattgagctcccagttgtatctcctgttccttacctcacatgcatacactgcttggtgtttagctgaagacttaagggaaacccaatattctgccctgcaaatcttaccttggctcccctaaattctctacccagggaggttcccttccctagccttagtgccacagcttagaaaccccatgtagaagcttgcgcaattatagggctttctttgttttccatctctcaggagtcactgtcctgcactggcttttgtctaacatctgaaaaacttccttgtatacattttatataggttttaatttaaggtggagaaggtaaatcgtgcctctgctactccattttgactagagtggaagttaactttgtatttcctaaatgttaatgaggctgagcatcttttcccatgtttattattcattccttattgctctctgaaaagcttgtttcatgtcttttgcccatttatatagtagtagattgttgtctttttatacttaatagattgtggatactaagaataagttaaggagtgctgtctctctctccttccctctgtctgttctcttggaagaaaagaaaaacatttaaattaatctgttccttaaaagctggatagagcttgcctataaaattgtctgaactttgcatttttttgtgagaaaatttcttaactattgattaggtttcaaaaattatagaattattagcctttctatttctttaatgttagtcatttttattacatttttctgggaatttgttttcattgacgtttttattttttgatagcattgcgcatagtttagctagatttttctatcctgctttgttgatgaatgtccttatgttttagtgtgtctcataaacagcatatagctagatgatgatgatgatgattattattactattttgagacggagtctcactctgtcacccaggctggagtgcagtggcgcaatctcagcttactgcaacctccacctcctgggttcaagcgattctactgcctcagcctcctgagtagctgggactacaggtgcttgccaccaggcctggctaatttttttttcttttttttagtaacagggttttcaccatattggccaggctggtctggaactcctgaccttctgatctgcccacctcagcctcccaaagtgctggggttacaggtatgagccactgcacccggccaattatttttaaatctaatctgaactttaactggttagttgagtgcatttttatgtgtactgatgtatttgcatttattccttaccaccttattttgtgctttttatgtttttttcttccactctttttttttcttttggaatcaaaaatgttttttaattccaccctcacccctctgccccctcttctttgttttgggggaatttccttggaatattacatccgtacttaaaaagtataatgttatatctttatcttcctctctaattgagagtcttggaactctccaagtcacccctcttgcaactttcgtgttaaaatcattcagtattttagttatagcttgtgatttttcaccttaaaattagaccttgagctggactcagtggtgcacacctgtagttctggctcctgaatggctgaggccggaggatcccttgaggccaggagttagaggctgcagtgcactgcgattgtgcctgtgactagcctctgtactccagcctgggcaacatagtgagacaccatctgttagaaaaaaaattagaccttgtgattattactgtttttgtacagataattgttggtttagatttactttatatgttagaagtgtttgtttattcattattattctcacatctcagacctttcacctaggataattttccttctttctgaagcacatcttttgatgttcctctagtgacatctgttgatggcaaactcttagtttacatttatcaaaagtattttcaattcattctataaagttgattttatatgtacataattctaagttgaggtgtgtctttttttcccccagtactttgaagaattagtctactatctttttacttttgttactactggggagaaatcttttgtcattccaaatgtcattcttttggatataatgtgacttttctttctgattgcttttttgctgtggttaaactttcaattttgaaatcagttgtagattggcatgcaatcataagaaataatacagagagaacctgtgtaccctttgcctagtttcttccagtgataccatcttgtaagattctagtatggtatcacaaccaagatgctgacatggacacagtggagatacagaaaatttccatcactacaaggacccctcttgctgtccttttatagccacgtctacttccctgccacttctgttttctccttcacctctgtcaaccactgatatgttctccattcctataattatgtcatttcaaggattttatataagtggaattctgtattatgtagccttttggggagccactcataatccggaaatacataatcccaaatgccatgatcatgaaggttgaaaccctgataatcataatcccaaatatgtaattctggaaagaataattttaaaaacctttaaaagatatttatttacattttgtttgtttgtttgttttgagatggagtcttactctgttgcccaggctgtagtgcagtggcacagtctcagctcactgcaacatctacctcccaggttcgagtgattctcctgcctcagcctcccaagtagctgggactacaggtgtgcgccaccatgcccggctaatttttgtatttttagtagagatggggtttcaccatgttggccaggctggtctcaaacccctgacttcaggttattaacttttttttttttttttttttttttgagatggagtcttgctctgtcacccaggctggagtgcagtggcacgatcttggctcactgcaagctctgcctcccgggttcacgccattctcctgcctcagcctcccgagtagctgggactacaggcacccgccaccatgcccagctaattttttttgtatttttagtagagacggggtttcactgtgttagccaggatggtctcgatctcctgacctcgtgatctgcctgcttcagcctcccaaagtgctgggattacaggcatgagccactgcacctggctgattattcacatttttaaaagaggatttgagaaatacaaacacaggccactttacacaataaaataggcaacaataacatacgtatgtttgcaagcataagcagttctcagctctactaatgacagtcacatgggtatgacagttatgaacagatgagtggtatttataaagaaataggtcaaaaagggaaatgtatcaatgcatagccctgtggttggtaattgtgtatgctcagctttataactgcagtcatttgaaatactttaagaacaaccagtgtcttccactggcttcactcagatgctaatctctggaaacacttgcacagacacactcaaaacactaataagtttctaggtgttccttaatccaatcaacttgacacctaaaattaagtcccaaagaacacctcttatcaactcagcacccatacatacctccttaaaccgtacttaatttccaaataaagacaatgagaaagttgtagttctacctatcatgatgccagtatcctctgattgtgatttttgggattttagacattatggattttagattaggcattttgatcttttgggatttcaccattcaggattaaggtgttcgagattgtgtcttacaggattataaaccaaatccctttttgggattgggtttgttttgccccagtcagccttattcttcagagattcttccagtttgttgctgtatcaatagttcacttttattttattttgttttatttatttatttgggatggagtctcgttgcccaggctggagtgcagtggcgccatctcagctcactgcagcctctgcctcctgggttcaagcaattcttctgcctcggtctccctagtagctgggattacaggcgcgcaccactatgcctggctaatttttgtatttttagtagagacggagtgtcgccatgttggccaggctggtctcgaactcctgacctcaggtgatccacccgcctcagcctcccaaagtgctaggattacaggtgtgagccactgtacctggccaatagttcacttttattgttgagtagtatttcatggtatgaatatactgtagtttgtttaaccattcacccattgaaggacatctgggttgtttacagtttgggaccgtaatgagtaaagctgctgttagtttctttgtgaacacagtcttcatttcttctggataactgcccagtagtgcagttgttaggtcatatgataattgcatatttaaagaaactgctgaactgttttcctgggtgagtcagactgctttacattcccaccaagaacatatgggcgatccacttcatccgcattctcaacaacatttagttgtgtctctgtgttttattttaggcattctggtaggtatatagtgatagatatataacttactctggttttaatttttatttctttaattggtaatgttgttgagtatcttttcatgtactcattttgccatctgcatatcctgttaggtgaaatgttactttatatctaattggatttttaggtttttttttatttttgagt

SEQ ID NO: 95065 - DNA, 70118 bp, Homo sapiens
tttttatttttttagtgatggagtctcactgttctgcccaggctggactcaaacttttgggctcaagtggttctctcatttcagcctcctgagtagctgagactataggcatgcaccactgcacccagctgtttaatttttaattttctgaaaaccttttctattatcaacaatttctacacattaaaaagtagaaagactagtataatggactctcatgtatccattcactcagcttttaactttgctttagcagttatcaaactcatggccatcccctggtcaataaagatgggttttttaatttaaaaaattttaattttgaagtaactttaaacctacaaaaaagttggtgtatcagtgtcaagttgcttattaagttccttgattagtcttctgatacttgcagaatcttttgtggtatatctgcttattactgatactggtaatttgcatctctcctccccgttttctttcattttgatgagtcgaggtagcagttaacaattttatggatttcaaagaaccagcctttttggtttcagtgacgtttcctctttctgtttttttatttcattgatttttttctctgaattttatttccctatagcggttactctgggagtaatttgctattctttctctgcttttcttaaggtggaagctgaggtcatgacctttcttctctcagatactggaatttagtgctataaatttttttctaagtactgttttagtggcatgttacacatttcaatatatcatttttattcagttcagaatactttgtattttccactttgatgactttgacccattggtgttttaaaagtttataatttttttttttttgaggtggagcctcactgtgttgcctaggctggagtgcagtggcgtgatcttggctcactgtagcttccgcctctgggattcaagcgattctcctgcctcaccctcctgagtagctgggactacaggcatgcaccaccacccctggctaatttttgtgtgtgtgtgtgtgtgtgtgtttttagtagagatggggtttcaccatgttggccaggctggtcttgaacttttggcctcaggtgatctgcccgcaccagcctcccaaagagctgggattacaaacgtgagcctgcgcctagatttatttacttgaaaacagttgtattatttcaggtcttatgtttaagctttgttaggcagtaccagagcagtttttgtttgaggcaaattttatcccgctaactaaagcaaaaacccgaatacccttcctgattccttgtggctaatggggttttccattgtggttggtaaaaatgggtacgattcccagccttttgtgagccctggtggtttaattcccttaatcattttgggtggttctttccctggccttcggtagtttcttcacacacaagtgctgagcggtacgcagctgaaggcttgagggagtccatcttgcaggtcagtcgtgttcttagtgggtcagactctcttctggtgatctgaccagcaaacctcattgctttggtgcttccccagacttccagtttcatctcccaaactcagggaaactgctgggctccctctgagttccctgtcctccctttttttgtgacctgtaaagtgttttccatcagtaaactgggacagttgtagggcttacctagtttgtttttttaatctctcaattatcagttttcttcattgcctgatgtccagttccttgaaaaccattatgtattttgttgttgctttagggcagaagggcaaatatgatcccttttgtctcaacttggttggaagcagaagtctccatatgagaatgtgaagtaatccttccctgaggaagcatattttaggtggtggtgattggaactggagatcagaattggttatcaaaaatgaccccatgggatgtggtggctcattcctgcagtctcagcattttgggaggctgaggtgggaggattgcctgagcccaggagttctaaaccagcctgggcaacatagtgagaccctgtctctatttaaagaaaactaacaaacccaaaccaaaacagaccccggtgactactgagtgatgactacaaggttcatttttgagcccttaaggaagaatcacaggctaaaggttaagaacctcagactagtattctttagcagggacagtgtcagagcaaaaggtctttggtttatcctttgatagtaggcctgtacggtgttattactttacacattcaggtgatgatagccgatcttctctacagggaaagaggttgggcttattctcaccatagtctatagtagcaggcacagcccttgaaaataactgccacccaaaagtgctttgattttatggaacattattatggtggaataactctggtaatatgctctaggaccattacactgccctaggtggagaagatcttgttaccatgcccaaaaggttttgtgtggtcatacggcttgtttagaggaagtcggacccgatagtgtgtaaggtttctccttttccacaatggcactgagttcagtatcttactggttatttatttttgcaccaatgtttatgtattcacatatttgataagaatgtcgtagttaggagtgaaattattaaaacgacgtaagtaactgtacagacagacccttctcttttttgagatggagtctttctctgtcgcccaggctggagtgcagtgaggtgatctcagcttactacaacctccgcctcctgggttcaagcaattctctcacctcagcctcctgagtagctgggattacaggcacccgccatcatgcccggctaatttttgtatttttgtaaagatggggtttttcaccatgttggccaggctggtcttgaactcctgacctcaggtgatctgcctgccttggcctcccagagcgctgggattacaggcgtgagccaccacgctgggcagatagacccctcttattggttgctttatgatagaacaccaagaagtttcaacaatctttatgtatggggttactttaaaattctgcatttggtttttacttggctgttaatttatatcatcttaaaataaataggtattgttacttagtgcacattttttaaatcaggtcatttattcagtaagcatttttgagtgcctagcgtgtgtcaagcctgctgtgcactgggtagatgagtagaggtatgggatctgaaacgaaggcagtaatagtcctactgtgagatcagcctcatgtaaagcagtggttatcacactcggggggctgaaacccatttaccttcttgaaaatttttgtggatgctaaagagcttttatttatgtggactatagctattgataccatatatgaattaaaactgatatttcaaatatttattacaaaaataaaattatattttaagtaacatttttggaagatattttctaaaaaaacaaaaagttagaaaactggcatcgttttacatcttgcaaatttctttaatgtgtagctgaatgtttaatatttgaaatacaaaaaaaaaaaaaaaggaaaaatatgtcagtgggctcaatgaattttttccctggacaagttttgtaggtagtcaggaataatcagaaggttgcccagtggacttggaatcgaatgatggagtcagctgagtgctctccagtaggagtaaacctgccatagcgattgacttttggccagggattgccatttatgtaattggtgcttagtaaatatttattggatgattaataatctctgagaagtttttggcttggtttcattgctagtgccatagctctttactatgctacagtgaataattttgagttgtgtgaagtacttttagctcaagatggttaaactacactacttctgaatctgtggaatgaaaaaggaagactctgttagtagttcctctcaatataaattgtcctgtatcacagtagttgctagtctaaatgaattaatgaaatatgccatgttttgtggtagttaagtaatacagattcaagcactggtatcccattgaaaatgtcattagaaccagctagcactttagaaactacttaagggtcatctaaagtttgatacatcccatgagcaagtgatgaatacatcactactttggaagaattcaaatttaaacaaaatcttattaaatattaaaagaacacttcgatggtataaaacagtggtccccaacctttttggcaccagggactggtttcatggaagacagttacgggtggggagggatggtttcgggatgaaactgttcagtctcagatcatcaggcattagattctcataaggagcacgcaccctagatcccttgcacgcgcagttcacagtagggtttgtgctcctatgagaatctaatgcctctgttgatctgatgggaggtagagctggggcagtaatgcttgcttgcctgtcactcacctcctactgtgtggccctgttcctaacaggtccgtgacccaggggttggggaccccttgtataatagacagttgatagaatgcagttgtatcgtctactaagatagaagatagttccctaacgtctgttccctttcttccctcagtgatcttccattgtttgaagcactggacctttaatccactgtaggtatggacagggaagaaaggaagaccatcaatcagggtcaagaagatgaaatggtaaccagctgttctaatttactggtgatgtgtgaagactttatctctgcaatttattattttagggactagaaaaatgcaattaacaacagtggcggcagcagctaactcaatgggcttctttcttcatcctgtgcttttgaattgggattgtgtaatatgtctattagttgcttttagtataattctttttttacctgtggtctgttaaaactgagaagaagtatgtttttgcatttggtgatttaagaggtaacattggctaatataatcctaaataaaagatttaaatacaatcccaaataaagatttctaattttgacttacaaaaattttctaaaatcagcttaataaaaaaagccaacttcaacttctctactttttgttggggggagccagaaagatgtcaggtgaagtataagatgccctgttaaatgtaaaagtcacataatgaagggagaaatttttagtataaatatgtccaaatgttgcatgggacagacaaaaagattatttgaaatttaaatttaagtgggccacctgcattttcatttattaaatctggcaacgcttgttggggggctcacctgaaactatgagacagtttgtcagtggatcaaattgattagtcgcagtggtattgggacaattagtaaatcatttgggaaatagtagattaaaatctattcgtccaaatgtactgtgatactctcgattatattgtgcaacagaaataacatgttagtggaaaactagtgaaatcctaaaactgagtttagttaatagtaatacagcagtgttaatctattaattcttaacaaatgtaccaggaaatgttaaaacattaggggaaactgcacaaaggatgtacaggaacttcataatatttttgcaacttttctataaatctaaaatttatttcaaaataaaatgtttatttaaaaaaaaagcccacctcataacaagataaattcaagaagaattaaaaagatatgtaacaatgaaattgcaaacattctagggaagtgtactaaatatgaatttactatatcagtgggaaagaacgtattaggcataaattaaatataaaatcaaagtgtaaataccaacaaatttacttaaaatataactgacagtaaactggtcagaaacaaaatttaaaggtaaattatggattggaaaatatttacagtttatgtgacaagacaataaatacctatctggaaaacaaagaactttggaatgtgtttctctgccatatcattttatcatttgataattaatcatgtgatcgctgtgtccatgcaggagatttatggttacaatttgagtcgctggaagcttgccatagtttctttaggagtgatttgctctggtgggtttctcctcctcctcctctattggatgcctgagtggcgggtgaaagcgacctgtgtcagagctgcaattaaagactgtgaagtagtgctgctgaggactactgtaagtttatgtgtttacttgtagctgattatttaaggagtaaaacaatgtctttgtgtatactttattcgaaataatagatgaagggaacatcgctgcctggataaaatgaggaatgctaattctagtatttctagaggatttgtgtttgaattgactattattataatgattagagtttaaaggaatcttaaagatgatcagattcacccccttcctttcatctctcttgttgccctgagagattagctacttgtctgttacggtgctggtccattaggactgtagtccagatctcggtcactaggccagctgcctgtctgctgtgtgatgctgatgcatttcagccttttttcttttttaaaaaccctaattggaagcattttataagaggttttaatatttagtccaaatatagagactaattaaggaattactcatgatattttatgaagtattgatgtgcttatcggtaaaatatgtcataaaaaccatgagcaatggaaagcaccttatgtttgaatttaagcatcctcatgaaatggtttaatatttagtgagtaggcgtgatgtttcctcaattagagatgaggaaataatgtcttgtaaagaatggaaaataaatgaaaatataggcagttttmtataaaattgactccttaccgttatccctttctctctttaaggatgaattcaaaatgtggttttgtgcaaaaattcgcgttctttctttggaaacttacccagtttcaagtccaaaatctatgtctaataagctttcaaatggccatgcagtttgtttaattgagaatcccactgaagaaaataggcacaggatcagtaaatattcacagactgaatcacaacaggtattgtgatcttaatgtcaaagtttctttaaaaatcagaattgttacattttatgctatcatgtatattctataattttgtgtttgcagttaatgcttgagataaatttacctgcatataaaatattacatattactatatataatgctatatataatcctatatatagctgttaatagaagtaacagattacatatcacaagtgattatatgctttttggtgtaacgtttatttgtgttccacagattcgttatttcacccaccatagtgtaaaatatttctggaatgataccattcacaattttgatttcttaaagtaagtatcttccttttgtttggattgtattttgaatatcctgaaaacgttctagatagaaaagagtccattctagtattcataaaattgctgaggttttattttataatttctattcacgtattaattaacaactccctgttgctgtttgaaggctcattagccattttaaaataagtcccaccgcagcttgcaccatggcagagtttacatgaaacttagagtcagtatgatgccaaagtctactgagtctgagttcttacctgtttcacctcaaagtgattttgagtatacctcatagcctgtgtctcaacttagagtatctgaatcattacctgttggtttactgacacttaaagcctgtggtacttgaggagtagagtaataggcaaagagaaatttaattttactatgtagataaagaatggggcaagctgtagtaattcctttatttttaatcgaggatttaagttatataagtacacattaagattctgtttttattgctcttaaaatgattattataaatactcattaatatcgttgctttagagtgccaaaggaattcttaattttagcggtaaaaagaaaatcatgttatgaacatttaaaatattcatacctgtaggtttctattggaagtaaaaaataaaatattcatacctggattttttactcagatacactaatgaattggaacattctggaatgggcatgggcatttttacatgcctagttttaaaaaccattcctgattaagaactattgccttaaagaaaatcaggccgggcatggtgtctcatgcctgtaattctagcattttaagaggccaaggcgggcggatcacctgaggtgaggagttcaagaccagcctggccaacacggtgaaaccccgtccctactaaaaatacaaaaaaaattagcctggtgatggatggctataatcccaaatactcaggaggttgaggcaggagaatcgctcaaacccagggggccggaggttgcagtgagctgatactgtgccactccgttccagcctgggccaaagagcgaaactgcgtctcataaaaacaaagaaaattgccaatgggctgtcattttgtttaaaaaaaaaatttttttttttttttgacttggcactgscccctgctgccttctggagaagtcatcaaattcagtgggaagaaatgtcaaacatatttactgtgtgtcttttgccagccatagaaacttaaaaatttaaacttactccattgattgaagtgaattatgaagcttagctttcctatgtggaaagtgtggaaaaggattggaattaagtatatgtaagactttctttgctttagagttatagctggtatctcagttaaaataagcataattaaggcggggggtggtggctcatgcctgtaatcccagcactttgggaggccaaggtgggcggatcacctgaggtcaagagcttgagaccattctggccaacgtggtgaaaccccttctctactaaaattacaaaaattagctaggcatggtggtgtgtgcctgtactcctaactactcaggaggctgaggcaggagaatggcttgaacccaggaggcggaggttgcagtgagccgagattgtgccactgcactccagcctggcgacagagcaaaactccatctcaaaaaaaaaaaaaaaaaaagcataattaagatattttgggaaaaagtagatgtgttagttgaagcccacttagaattattacagattttaggcattgtctgtgactcataaattctgcacttcaaaccaggtatgcatttagggaagggtttggcttgatgcttttatggagatggaagaaaatgaatagaaattcttaatttgactctaaaattgaaaaggagaaactatgtagctaaaaagtaaaatgttttcatctttggtttagaattctcaagttatactttatcttaaaattttaaagtttaattttagctattacagctttggcacagtcttaaggataatgatattattatataaatttgagtatttagagccatctcatctatcctgcaataaacatattgaatagcttcgaagttgggtttgagacttagatttgtcattgtttatcttaagaatttgagatttaaaaattctcatttgttatctcaatttttgttaagggtttctaaggatttgtaaggaagtcacacctttataaaatcaggcatatagaaaaatgaggcgttaagaaatttggatattttaaactttgtttaaagtaaaaactttggatttatttaggggactggatgaaggtgtttcttgtacgtcaatttatgaaaagcatagtgcaggactgacaaaggggatgcatgcctacaggtaatttttatccaactaaagttagatcttctcaaaattcctaaaagcagtagtatacataatcaaccctttaccatatagttgtacatattaacagatacttaaatattacagacatagtagttgagaatttattgatgttttatttgggtaagactgtcttagtttaagaattataaaaatgtgcaagctgatattttgaagttggtatccctgaaattataccatatttcatcagttcccaggtgcacgtttttccaccttttaacatctctgagattgggatgtgtcatagagttggtgaagtgtcgttcttgatagcatttttatctttcttgatcatataataatggtatgccttacaattgatagcaccttagattttctgaaatacaagcatgagttcaaattcaccgtaatgaaagattgtaaattgggagacataatctccttcattgtgttattccttgttaaatcataaaaatacaccagtgtattgcrtatgttaaagataaatgccactttgaaattcaataagaaattttcttatagttctgtaacatgttctttcaaaggggtagaacataaaattcactcatttagacttacatttcataaaagtctagaattactctatcatatagaaaatactattgtaacataaggaattaagtggaaacatttaaactttaaaagcattttcttttaaagtcgaatgtacaatgttttgaactaaacactgttagtgcaatattaaaaaaaaaataagatccctcaaatttatttggcttcttgcaaaaaataattgtaattcaaaattgttaagatctagtgtgttcaaggatgcaaaagagaaccttttgctcacatggtattatagactagtgggaaagatacttgtcacacataaagatgtgagacaaaatgaagttaagtgctaccagtataggtatctactattgacttctttgttttaaattctgtaggtagagagtttgaattatagaagacaggtgtttggagacatgaataagaacagtctgtggtttaagccttacctaatacaatgcctttcgtaaattatactattatgatataatgtaatactatkaatgtattttcctgttatagaaaactgctttatggagtaaatgaaattgctgtaaaagtgccttctgtttttaagcttctaattaaagaggtaagactattgattgtatataacttaacagtcatgatcaatggatgtgtcaatttggaatgagttgtgattaaaatattcttggttttctttttcctaacctctttttcatatttttacttggaaggtaaagacggaagacatttactctggtagagaaagaatctggggcatgtattcttaaaattttgtctagttttgcttttattacctgttgaatgtctagcagagttaggctcaccaatcttcattctggtttttggctaaagctcaagaattagttgtattaggtgaacacttttaggagtagaagtaagattgtttttcatcagttcctgggagtggccatgtaatgttgcttatgagcatagcatagtgtagtgattaggaattggaagacctgattttaatgtagttccatcagtaactagctctgatctttagtacattctctctgttgctcctttacctataaacttggaataagttttttccaattatctcatttggttttgaggtaaaatgagactatatatgaaagtgctttgaaaagtacagaagcatcaatttgaagacattgggtggggggtgtttaatgaaattgataaaataccatgacatttgggtggrtgaagttcattgccaaggtctccctttatctctttttcattcaggatttaatacttagttattatcttagagaaagcaaagtaacataacccattaactcatatttgtctttcctttgacctccagttaacttttgatatataagtaaatttgtgttttgagtttatagtaagcaaacatttttcaatttcgttaaaagttttgtattctattagcccagagcacagtaattggaaataaatgtactttattgccaaagcagattgcagaacggctaaaatcatacacttactagccttttctagctgaatctatatttggatggtatgaatctaaatggatgccagtaatttaaattaaccttatttagccaaattctagtattttaatgataataagagtatgatggcatattgccctaccttttttttttttttttgagacggagtctcgctctgtctcccaggctgcagtggcgcgatctcggctcactgcaagctctgcctcccgggttcaagccattctcctgcttcggcctcctgagtagctgggactacaggcgcctgccaccatgcccagctaacttttttgtattttttagtagagacrrggtttcaccgtgttagccaggatgttttgatctcctgacctcatgatccgcccgccttggcctcccaaagtgctgggattacaggcgtgagccaccgcgcccagcctgccctactttttagggaagtacattttgccgtagaatactatggagcttatcttgtacatatttgtatctttttgtttgtcaaatgaaaagatggacaatctgtatggtcattaatacctcattcagtttgactttaaaatcttgttttttaggttctcaacccattttacattttccagctgttcagtgttatactgtggagcactgatgaatactattactatgctctagctattgtggttatgtccatagtatcaatcgtaagctcactatattccattagaaaggtaagttcaaatttattatgggtttcacaactgtatttgtattttgtagtaacatctaatgtgtgtagaatagtactcagcacaaagtaaattctcaatgcagtcattattttagttgcatgaatatatgctccttctcccctccctttttgtttgttttgctgkttgggaggttggggatagcaggtgctttgtagagtcaagactctaccacttgactgtctagagaccatagggatctgtagttgctgatcacagactggaatactggaaggtactgttttcagggctatcctgttaaagtgcttcttgttttgtcttgaactaaaacaatgaatactctgaatttctgactcgacattttataaagatggagtgatatgcatttattgaattaacttatttttttagcactctggcttttttcctgaggagtgggttcatattggctagtttctaacttctttttcctctttcagcaatatgttatgttgcatgacatggtggcaactcatagtaccgtaagagtttcagtttgtagagtaaatgaaggtaagtaattgaatgttggaagaataaatcaaaaaagatacctgttaggcataatgtgtgaagtaagcccaaagtataatacatatacattctttgattgattgattgattgagtcagtgtctctgtcacttaggctggagtgcaaaggcacaatctcagcttactgcagccttgacctcccagactcaagtaatcctcccactttaggctcccgagtagctgggactacaggtgcatgccaccatgcccagctaatttttctattttttttttttttagagacagggttttgccatgttgcccagtctggtctcagacttctgggctgaagtgatctgcccacctgggcctcccaaagtgttgggattacaggtttgagccactgcactgtgcacccggcctttttttttttttttttttttttaaagtcgatgtggtctcactgttgcacaggcctgagtgcagtggctcaacttaccctcctgtctcagcctcccaagtaggtgggactacaggcttgtgccaccattcctggctaattttttctctttttttgaagaggcgaggtctcactgtgttgcccatgctggtcttgaattcctgggctcaagagatcctcctgcctcagtctcccacagtcttgagattacaggcttgagccactctgcctcgcacatacattcatttttttaagaactaaaagtatacatttcagttcctgagtttgtatcaaattcatttatttatataaaattgtatttttcttctatgtagcaggcactatgctaggctctggggattcggtgtagagataacagtagtaacagtaacaatacagtgtgacaaatgctatgataaggagaagtcagccaacttatgtattaggggagctcatttactgtaggtatcagggatgacttctttgattaagtgcttgtaagtgatgactatttgaattagccaaataagaggtaggtgagaagttgataaggggaggctgagagaaggagagaagagggttctaaatacccaaaggcctagaaattagagattgtgtggacattataagaactgaaagaagaaatttagtatgacaaatacagcaactatraatgatggatagctctctgaagcatgttagggatttgggctcagtccaaaagacagtggaaagccattgaaggctattattattaatttattttattttattttattttttcgatagagtctccttcccaggctggagtgcagtggcaatcttggctcactgcaacctccgcctcccaggttcaaggaattcttgtgcctcagcctcctgagtagccgggattagaggcatgtgccaccacgcccagccagttttttgtatttttagtagaaacagggtgttaccatgttggccaggctggtctctaactctgggtctgaagtgatccacccgccttggccttccaragtgctgggattacaggcgtacrcaccatcacacccagctaatttttgtgtttttagtagaaacagtgtcaaccttgttggccaggctggtttggtactcytggcctcaagtgatctgcccgccttggcctcccagagtgctgggattactggcatgagccaccatgcatagccaccattgaagggttttaagcagaggagtgataaaatacttgccctttggaaaaaaatcattctggcgtccacattcagactggtttagaggagagtaatactgaagacatgcccccccgaatcaaggtagcaattgcggagatgaaaagaaatgagttcaaaagatacttaaatgtgaccattgaacaggatttgactcattggatatgaggccatggagcagtgtctggctaggtggatggatgttggtgctgtttagttaaataggaaactggaagagaagcaggcttgcaagaakggtaatattttggacgtgtaacttgtctggcaagatgttgaagaggtaaaggaggcagcacagcatcatgggccttggaggcagaagccgctttgatttactcagaacaccaaatcagtctccattttcttgactcagactacacccaagagattgcttccttccctgtgcttcctggccacttgctactctagctaggaagatctgcctcccttagctgaagtctaagatgtgtagcttattgatgcctctcctcttcttgttctgctgttgctgaakataatggggatgccagggcagacataccattcaacttgaatcttccttacccactttgtatagtcttacatrtcattgataccttgttttctggtacgcctaaaaggagtagaacttcaagtggtatttaaaagctttaagaaaagtcaaatttttacttttttcttcccatctgaggaatggatttattttctttttaaagaaatccaaatttttaaaagaagggatcttatttttaaaacgaagatcgataatatctactatgtactaaatgtcattctttaaaagttgttccctcataatttagtaaattacttccttttttaaaaaaaggaaagaaagagtgtttgtcttacaggctaacatcacaaacaataagtttcttctcatccatctccatttataaactagtgtgactgtcttctgagcacagtattaaacctggacagggagagggagggtgttagagaatgagaggaaaagagagagaatacctacatataaggtgaccctaaagaaaagcctttcacccttcggaagatcttttcattttcatttttctttttttcaaacaccaacttgtaccagagggaagatctttttttaaaagtgtttcactaaaatttgtaaggaaataatgagctagataaaatattacagtgtttatttaatgaatttactcatatttaaaataatatctaaaaagagtaatttaggaatattgaggcaatgagacttgaaggttataaatagtggcagtgagaaaaggaatattatagataagctgttgaaaagaaaagatgctaagttttctagtgcttccttctgtttccaagggattatagaaatcggagtttgtttgacctgtttcacaggcatctcctttgtggactcattgtgtctcttccttaggctaatagtcaccatttatcatggacggttgtcatgagtgttgaagcacacttaacctgcttcgtcagagggtacttggcatcaccggtgcacagctggtgtcctagcaggagactaactagctgacacaccgtgctttgttagcctaataatcttatttgttaaaacttgccatttgttggatttttctattttaccccattataaacttcttattgagatcagatgacttctgaatagcatttgctgtatttttccaaggtaaagaatatctttttcagatttttctttctttctttaatttcagaaatagaagaaatcttttctaccgaccttgtgccaggagatgtcatggtcattccattaaatgggacaataatgccttgtgatgctgtgcttattaatggtacctgcattgtaaacgaaagcatgttaacaggtaagctaaatgagtaaatatcaacatgagttgttcatgatatatcatgactaagttagtgagtaagccttttcaaaattagctatgtcatttgtacctttactcatgaatatgttggatattggagatttaaaattctgagtagaccgaattctgcattatactcagctgtaatactagatactgtgctatagtgttggtcacatctcttgacctcactctggctactctttggaccttaggaaatggtttawggttagggaagtggaaaggcggccttttcccacagaaaatgtggcatacagtatttggttccccatttgatgtgtaaaaagtgggaataaagaaagattttatatttttcttgaactgaggagatacaggctttaaaatgacttccctttggaaattcacaatcttgaggtagagcttgattttttttttgttttttttttgtttgtttgttttgagacagagccttgttctgtcacccaggatggagagcagtggtgcgatcttggctcactgcagcctccgctcccaggttcaagcagctcttatgcctcagcctcccgagtagctgggactacaggtgtgtgccaccatgcatggctaatttttgcattcttagtagagayggcttcaccacgttggccaggctggtcgtgaactcctgtcctcaggtgatccatccaccttggcctcccaaagtgttggaattacaggcgtgagccactgtgcctgtccaatatcttattttaatcgtgtgaattttttttttaattgtcctagttgatctggctagaaaatgatttatatgtaatacattttgaaactgttaagagtcgtgtcttaaaacacacaaacacatatctcgtatcttaaaacacacaaacaaatacatatctgacacacatgccttctttgaagcaagaaatgtgaatgctgcagagaattaattttaaaaagaatttggctgtttgtggttgtttgagagaaccaccacattactcattttcacatctcttttttgcccagctgtcttttctgttctgtgtgtgtgtgtgtgtgtgtgtgtgtgtgtgtgtgtaggggtggatcggggtaggccctcacatctcttctgtacagtgctttccactgttaccattagttcttagaggtgcagggactatagcaactacttaatcttttttgaaattatttgaaactgaacaatgcaactgtttctaaatataaacaaatattacctttgagccacaaatcactttctggaattattgtgggagataatatttgatacttctatgtgaggaaattggtagacaaaaaattaagccatgttgtccacatatacaactctcagtgattattgtaaacagtatggtagcatttaaaatatttaacaatttaatattttttggtgttcgatactgattcctgtgctttcgtttaataatttgtaaactgtttttgttgttgttgttgttttttaaaggagaaagtgttccagtgacaaagactaatttgccaaatccttcagtggatgtgaaaggaataggagatgaattatataatccagaaacacataaacgacatactttgttttgtgggacaactgttattcagactcgtttctacactggagaactcgtcaaagccatagttgttagaacaggtaggaaacatcttaattaatctctttttgcatgtttcagcatatttgatacctactaaatgtttaaaaagagattctgggctgggtgctgtggctaacgcctgtaatcccagcactttgggaagccgaggtgggcggatcatgaggtcaggagattgagaccatcctggctaacatggtgaaaccccgtctctaccaaaattacaaaaaaattagccgggcctggtggcgggcgcctgcagtcccagctactcgggaggctgaggcaggagaatggcgtgaacccaggaggcggagcttgcagtgagtcgagatcacaccactgtactccagcctgggtgacagagcgagactctgtctcaaaaaaaaaaaaagagagattctgttttgggagataattctcattttcttataaaaatatcaataattgtcttctttttttgaaaggatttagtacttccaaaggacagcttgttcgttccatattgtatcccaaaccaactgattttaaactctacagagatgcctacttgtttctactatgtcttgtggcagttgctggcattgggtttatctacactattattaatagcattttaaatgaggtatgtatgtgggactcttaatagggtttgaacctcaattatttatcatatgcagctattgaggatttgaaatgtggctastgagaatgaggaactaaaattttaagctaatttaattttaattaatttaatgctaacaaagtcatgagactagtagctatgatattagaaagcccagctatagaacatttccattgtaaaggatacttcttttgggtgcctctggtttagatggtcttttacttggtcttgtgactttaaaaaaaaaaaacaggaaaaaaaacccccccacataatcaccaaaagctttattttctcttttttacctctgagatgtaatatacagtgttaaaatgatttgtggttagttaattgaaggcgccgcttgtcagaagtggagagtggtacagtaaggtgtgtgcacgctgagtcaatatctgataatgattgttgaccggctttgaagtgtgtcatgtgtgaagtatgtagcgccttgaaaatgagataagtttcttttgaaagtagctgtcattctataatccattgagcttttttattttgcagaaatatctgaagaaaaaaattatatatggttaatagatatgtatatacacacacatacataaaattgaaatatacaattgaaaatggcttacagattttcactaaagaaatacccatattaaatccgtaaataatactggggatttgacatttatttttgtgttaattgtaggtacaagttggggtcataattatcgagtctcttgatattatcacaattactgtgccccctgcacttcctgctgcaatgactgctggtattgtgtatgctcagagaagactgaaaaaaatcggtattttctgtatcagtcctcaaagaataaatatttgtggacagctcaatcttgtttgctttgacaaggtgggttcagtttcatagttactttcaaaggttacttcgtagcgtttaaatatttagatcaatgttttttattttctttgtcaacaaatttggacacattctgtcatgttcctctaattttccttttcctccacttatttggtatatgcatcatttttctataccataagttctcacttaacattactgataggttcttgraaactgcaactttaaatgaaatgaaaccagttttaccataggctaattgatacaaatgagatttaagttcctatgccatattttggtcacaaaaaatcaccaaacttctaaataaagatctaaaacacttctgatattaatcattgaaataaatatgagctatacattcatttaagaaagaaataaaaacaagtaaggtaattatttacccagttgktttatttcaggctcctgggtagtgggagcgtatctcagcaactggcggaacgaggcaggaaccagccctagacaggatgccatcgtatcgcagggtgtactcacactcgcgcagactgggaccatttaaatgtgctggttcacttaacttgcgtagctttgatgtgggaggaaactgaagtacctggagtgaaacccatgcagacagggagagaacatgcaaactccatgtagatagtggtcgcggctgggcctcagctctccccaccactggcacccatcgtgttataaaaaaagacggacaaaacaatcgtatttgaggacatgctatatttcttattttctcaatttttaatactttggatattgcttatttgctcaaagcttcagttaactccagaattaggcctagtrgtattaatagtagtagcagtaaagattacgtgacctttaattttttagacagtaattcttatttaacacaataggctccatacatatatatttattatgattttattgcttgtaagtgtgtatgtttagtgtttgctgtatgattttattgaatatgtttaagaattatgaaggtcactgattttatgtgaaaatgacaaattatgtacctgtgtgaagtatatcttgcctcttagaaaggtttctcctttcctgagctggaattttctttaaagttttctgagaattaaactttgaccagaaaaccttctatcaaacttttctgggtaactgatgtgatacaaatttgatttttgtgcatttcattattacagaaaaaaatgggaaacatgttctgttagaaaaaaatatgtcacatactgctacaattatttcatatttatcagttcaaaaaatttcacttatgcttgtcttttttggaaactttcctaaaagttttaagacaaaagtggagaaaagatgtgtgtataataaacactcatttactcattacccagctttatcagttatcaacacattgtcagtcttattttatctatctgctcattttgaaggggacagcatcagacattatttcactcataactaccttagtatgtgtctagaggatatttaaaatatcactatcacatttaacagaattagcaattctttagtttttctaatatccagttgagatttcctcatatctctaatttttactagttgatttttcagtcagaatccaaatagggattacattgcttacaattaacatgtaacaattgcctttacttaccccttatctccagttattttgttgaagaaaccaggtcatttaccttgtggatttggccagttgcttcctcctgatgtactttaacctgttcctcttggccctccttatacagtaatccttccttttttgctttataggcatcctttattgattgataagataggttaactggtgcatccttccattgattttttttttgatagtataagcacgtaaatatatacccctctctgcccttacgcagaagatttgtgatcattgtttgcaccccctctcccactttaaccatatgtcctggaagccattctctgtcagggatcttgcctgtttctttttttaactctgtagaactccattatgttatatgtagcatagtttctaatgctgtgtggttgctttttatttttatttttgggtttttttttgaggcatcatccatactttgtgcatgtgtgcttttttgttttttagactggaactctaactgaagatggtttagatctttgggggattcaacgagtggaaaatgcacggtaaatattagttagacttgatagtttattagtttatttttaatattttaacatgtgcaacattcaaacataaaggaagtaatagacaactgtgtacctataccaggattaaaccgtggacatgttgccatatttgcttcagatcgcttcctttagaatattaaaatattatagaagttgccaaagtcccactgtatcccttccccaattcctactgccattctgaaattatttttgcatattttatattttttctaagtataaatctataartaagtatccatgaatgatatactgtacatatgttttgctgcttttttcccctctccaaactttgttttcaagatttatccatgttgatatgtgcagatctagtttattaattttaactgctctgtcttattccattgaatgattaaaccttgtctgttcttctactaagggacaattctgttttttcttcttttttctctgcactgttgcaaatagtgctggaattaaagttcttacacataagtccttgtaggcatgtggctgagtttcagtaagctagatccctgtaaatggaaaggctgggccgtagcatgggcacggcttcagctttatgctttctctctcagtgggtaaagatctttttactccacattcttgccaaacttaatattgtcagacttgtaatttttgccagatggatggatatgagtattacattgtggtttttacattcttctcatttcttataaaattgagcatcttttcacattttggagggagggtcatttagcattcttctgtgtattgtgtgtttatatcctcatttttctgttgggaagtctatcttatttgttagaggtcttttttattttctggataggaatctttttcaatattgtgtattgaaaattatcctattagtctctggctcatctctttacttttgtttctgttgctttttgaagctcagaagttttactcctgtagttttgtttgtgtcttcccccctccccctgtcaaaagtctgctaaattttggtgtatatagcttgagagacagtattgtttggccaatgtaatttcaagagttgttgtgtcttggaaaatagtatgtcacrttgtgacctttcttatctctagtaatgcatgttgccttaaattctgttttgtcttataattatatagctctataccagctttcttttgcctgatgtttgcctagtgtgtgttttgccacttgtttacttttcagtctttctgtgccatgatgtgcacatttattcagatatattagaaattatttctaccattgctcccccaatttacatacacattttcacattctcattttttctctcattttctcactttatgcatcccaatcttatactgcttgttcttacattatcaatatttatacttaaagttcatggatgttaatactgccttttaaccactcccctgccccccaaaacaaacctatggactgtaagatacttttggttattctcctcccttcctatatgtatttgttgcataatattttctgattattattttggtcttatacagtctgcaygcttagatttacctaggtgtactaatgccttaaccattgcatcttgtgtaaattgccatcttctgtaactacattcatttgctttgtttcactgtcactcttttttttttttttaagtgaaagcaaatttaagaaagtaaaggaataaagaatggttccttcataggcagagcagcccactgtcacttgggtggtagtgtaactatacagatttctaggtttgacatttgtgttctctcaatactatgaagctgttatttcatttctcttaataccttttgttaattggtactgataaatcttagtctttttagtaatcttttttttctctggttgcttgaagaatatttcttcacccttaatttctgcagattcactgtgatctttttatttgtgtgtacaggattcatgatgcttcttgatttcatgctttcatgtttttcataaattctggaaaattttcaggccttttttacttccattatggccttttccttgtgttttgttttctctccttctgggaatcctaaccatgtgttggacaacacatggtttacttggttctttccaagtctgctcccacccctactctcgcatctacagtgtcttactctttgtatgtctaattttaaaatgccctttttgcattctttcagatttgccattctgttatcttaaatttacgggattctttatttttttattttaaacataggaattggtatgggtgtctcgctatatttcccaggctggttttgaactcctggcctcaaatgatcctcctgcctcagcctcccaaaatgccgggatgacaggcatcagccactgcccctggccaaatttataggattctaattctgtctttgttatgtctgttgacactcttggtgaattgtttgctagcgcatctttaaattatggactcattcttaacagaattttctttgagctcccctctggagaagttctgactttgcttggctaagagccccagtggtaatcaacggtgtcatacaggctttaactgacctcctgtgtttcaatccttgctctgctacttatggacggtgtaacctgggacaagtcacttaaccaccctgcttcagttttctcatctataatgggggtaataaaacaccttttctatggtgtgaggataatgggccaataaatttaaagttcttagaataatgcctggtgcatagtaaatattatgcagatattagctattttcttggactttgggtgaggaaaaagacaagcttattcataattaatgcctttaggtctgtgggtgaattttttctcatctgcccttttcccaagggcgtgtagctcttcaagagtactggctttcctgagtcagagggatcctttcagtaccagctacccactttgcatggggccagactttgtttcctgtccttttgtgggtattaaatcccaagttcttagtttactgagatggccycctcccttcatccccccagcagccatagcatcagctcaagttcacacccctctggttttcttttccctgtatttctgacacttgacagtttctctttcttaggagctcagattgggatttaaaagattttttttttaattacaaaaccagaaaagccctgttagaatattatcttgaatcttagaatttatgaaactaattcagtgtgtcttctgcttagatttctttcaccagaagaaaatgtgtgcaatgagatgttggtaaaatcccagtttgttgcttgtatggctacttgtcattcacttacaaaaattgaaggagtgctctctggtgatccacttgatctgaaaatgtttgaggctattggatgggtaagtcaaatattttaaaatacaaataactttaggaaaataatagttaaaaattaaattacctcatacaaggattatttctgctttttgttttaatgacagtctatcttgtaccctaaaaggagctatgtaatttctaaagctacatcaactggagaaatattttaaaaatcatgcaaaagtaacttttagttaacccatttagtacacctttaatagaggctgaccagctcaggcccctgctttgtgtttaaggtaaaccaggggtcagcaacttggggagggtagagcagagccagtaagatgatctcaactgacacaatttcttggccacaggcaaaggtgtataaagtcgtttgtcttcattgctcttttttacctgtcttttgtttactgtgtccacatacatgcacatgtttttgtttgtttataacttccttctatttttgccattgggacttttaatttctaagtgcctgcttacgttctctggttgttatcattttacagcattcagttcttcttttataaatacaaagtcagttcattttagagttcccttctggcttctgaattatttattttctttgaggttatggtctcctctggcccccaccccatggctggtgtctctccttcatgctcttggttttcattgtacatctggatggcacttttttactctaaaaatgaagatctgatttggtaattctgcatagctgcagtgagctacttcaaattttacccttgcccatatgtatgttagtgtttctgatcgtgaaggcttgttgggggatgggggatggtgcttgctctgtgtctggtggggtcttatcgacaggggttcttaaagtttcaaaggaatagtttcagagttagcctctccgttgctttcctcacccattctcaccatgcttgcacatgtggagctctgtactctggaatcctcaccctcatgtcagcagcctttgctctgtcagacattcagtttatgtctctggaggaggactccctggttttttgtttggctttctttagctcagctactctggctgataagtgttcctgcctcacctggtatcttgtgtttgttctgggctactgtttcgttcccgtttgtatccatccataggtttcagtttgccctttgtttccatatttgaaatcccttccttcaggtttgttttctgtttacatttacaggatcctcccttccctcttccctgcctccccacctccctccctccctacccacattttgaaagggagagagggaggaggtgactggataagtgctccatctgccaactactgaaagtccatggtaaacactcttgaagtttaattctgaaaaggaggcctcacttcatttatagagagaataacaaaaatgggctgatttatcgttcttctctaagcttttctccaactgaatagattttcagtagatttagtgttcagtgttggtgtatcttcaaagaaattaagaaaatgtgtataatggcatatttcattggccctgagttgctttgatgcttgatcccaccagagcttacttatcmgtgaaatggtttcacatagccagtcacaactgtgacttgatgtgattggtgtcatatgatacaagatgcagatgtcatatgatacaagatgcatcccagttttagagatgttaagatacgaaaaaaggtgtcttagaattgtacaaaattggctaatttttcacagttccctattgttttctcatttattgatcccactaattatagtgtgtgtttaatatacgtttttcttcgaatgtttttcaccaaaaaaggttctttaaagtattagcttaactggaagtattcaagctgagaaactctaaactcatatctttgtgctttagcctgttcttgacccagcggttctgctaaccatatctgagctctatgtacttttgaatcctttcttggtagcagaaaggaatcactggatgagcctgaaaattctggggactacaagaaccttttatcttttgcagagctagtctctaaacccaacaagttgtaagagtgaagtgagatcagtttctatttctttattctgcttctaaccctgaatgaagcaacccttctcccatgggttgctaggtatctaactcaccatctttgttcatattttcttttacttatgttagtgatccagtagtgctcatttgttccttggacatacattttttttaattattgaaaatggccataatgttctatttaaaaatggaaccatgaattcagttttatgaagcagtgcttgaatgttgtgtttttgtttttttttgtctcttttttttttccagattctggaagaagcaactgaagaagaaacagcacttcataatcgaattatgcccacagtggttcgtcctcccaaacaactgcttcctgaatctacccctgcaggaaaccaagaaatggtgagaaatcacttaaagctagataaaactgttggtggttacttatatttatttttaatttttttcaatttttattttttatagagacaaggtcttgctatgttgcccaggctggtctcaaactcctgggctcaaatgatccccctcaaccttggcctccccaagtgctgggattacaggtgtgagccaccacccccagcctgcttacttacatttaattctcattttgaaatgttgctagaagaggaagtcacaagtcctttatttaactcttatgcagagataggaatattttaactgcgtttatcagaaactacacctctgtgttgagatataattctcagtactatcacttttctttcctgtttactgagcagcttagtgccttgtgatttatacagctggtggttaatcctcttaaattgcatctgtattcctagaatttaataaaaagtatgtatgaaaggctttacttttaggtgaatttttaaatatattccccttagtttattattactattttttaagttacctgaaattttttttacatgtataagtattacatatccaagaaatttaccaagattctaataaacaccactttatcttatttgtataactggttggcaagattctgggtaattcattttccttcctgtttatatttgttctttccagagtttattattattttttgagctggagtctcgctctgtcaccccggctggagtgcagtagtgagatctcagctcactgcaacctctgcctcctgcgttcaagtgattctcctgcctcagcctcctgaggagctggtattacaggcgcacgccaccacacccggctaatttttgtatttttagtagagatggggtttcaccatgttgataagtctggtctygatctcctgccctcaagtgatccacctgccttggcctcccaaagtgctgggattacaggggtgagccactgcgcccagccagcctattattttttaatttttattttgtgttttttggtatgtacacttgcttgcaccccttagtttattttagtacttaaaatgttaatattttcaggatagcagaacatttgaaaatatttaagaacatactttttaaaaatgggaagtagtatagaaggaatcttgaatcctgactttgaaaaacagttgcttgtttcttttccaaataatgttttgtggatgcttagtaaactttttctaactttagtgtgttaatagagttaatctgtactattttttcttgttttgtttcgtttttaggagctgtttgaacttccagtaagtgaagaatgtttacttcttactaagtatatttgttttgattctttaagaatattaagtgctttgtgcctcttttgaaatgatataggctacttatgagataggaattgttcgccagttcccattttcttctgctttgcaacgtatgagtgtggttgccagggtgctgggggataggaaaatggacgcctacatgaaaggagcgcccgaggccattgccggtctctgtaaacctgaaacaggtaaggaaatatctatgctttgggtacaattctggtatttgagtaaacttgtattagcaactctaacaatgaaatttactctttcttttaaaaagttcctgtcgattttcaaaacgttttggaagacttcactaaacagggcttccgtgtgattgctcttgcacacagaaaattggagtcaaaactgacatggcataaagtacagaatattagcaggtgaggttgaacggctttcctagtttcccagtcatcatcatttatggttatattagtcatgcacagtaatttgcatgtaattgagtatttattgaatgtatgaaaagatatctaatataatattgttttaggtgattgaagtaaaagtacattttccccactgcctgatttcctttcattctgggtttttttttgagagacagtctcaccccgtacctaggctagagtgcagtggcactgccgtctcgggtcactgcaacctccgcctccccggttcaagcgcagtggcgcaagtctcgggtcactgcaacctccacctccccggttcaagcaattcttgtgcctcatcctcccaagtagctgggattataggcgggtgccgccatacctgactaatttttatatttttagtaggggtttttgccatgttggccaggctggcctcgagctcctggccttaagtgatcattctgtgttgactgtttacctatgtttccttatgttattgtaacatcatgttttttccttagagctctttgaaactgttttcaatttgttaattattatgtgcccactatgtgtcaggcacattccaagaacagtaaatgtaattttttagaagtttattttcaccaattgatcttctcacttttgcccagtggttggatataactactaatttgatcagaatataatgagtcatagtaaccaagctcctcccactccacttctttcctaatccccagtactctccatgtccccccgtcaaatgacagtgtcatattcaaggattgtcactttgactgtaactgatacagacctaccttggaggatagcatttttgtttaggaatatttcatgatgtacctagcattttgtaagcagaaaggagtgtcacttggctgtcctgctaattctgcctatttgggggaggtggtgaggtctaagcatgagtttaaaaaaaaaaaatgaaaaacctctacccaaattatgtgatacatatgcatgtcgggaaccacaaatgggtataatattatatcctaattcctactaaggacacattagtctcttcttaatttatagcttcacactagcaagggtgctaggggataagacagtggatgcctttgccattttcccccataaacactaattactgaattgcctacagttctttttttttcttttgagacggagtctcgctctgttgcccaggctggagtgcagtggcacgatgtcagttcaccatagcccccgcctcccgggttcaagcgattctccttcctcagcctcctgagtagctggaactacaggtgcacaccaccatgcctggctaatttttgtattttaggtagagacagggtttcactatgttggccaggctggtctcgaactcctgaccttgtgatctgcccgccttggcctcccaaagtactgggattacaggcgtgagccactgcacccggctgcctrtagttgttaggtgtgtcatcttgagacatccttccatgacattggatagactgttccttgtgctgaggataccctgtccctccttgttaactttcctctctttctctactccctttcttctttactcttccaccgagacctctgtgtttccatttgaccttgtagaaacaggttttagcatttcccttatagcttaagcctttatatcttgaatattggactattcactaactagagggtaagatttccttgacctgtatcgttcatacggtgtgagagagttaggagacgagctgaagccagaaactggggcctgaaggaaagcggcttagtgcttttgacacattgtcttcacattgatacagctttgggctttgaaatacaatttcaggtttcaaggctttttcctgctgttaaaacyagcagtttcatttatattaattttctcaactattctctaatatccttaccacccattgttagaaattaggtgtttcaaagattttagatttcatagatacatacttcaagcaacttttattggaattttgtcagaaaaatcatttggttattccaagtctgaaattctagtctctgacctcagaccctcctccttccccattgagaaaaaaatttctatgatataattcaggtaggttgaggtgttttttgtttgttttctttttttgtttgtttcttttgagataggatctctctttgttgcttaggctagagtgcagtggaacaaacacttctcactgcagacttgaccacctgggccttaaatgatcctcactcctcaagccttccaagtagtgggactgcaggcacatgtcatcatgcccagctaattgttttttcattttttgtagagacggggtctcactatgctgcccaggctggcctcaaactcctaggttcaagcaatcctcctatttcagcctcccaaagtggtgggattacaggcatgagctacaatgcctgacctgagatttcttaagaacgtaactatcactgaacagacttcatctcttttatagtgctaaagcacgtactatttttgtgtgcatctctttggttgcatgtctgtttccccacccaagtgtcttgagagcagagatcatccctttttgtctttaacctcccagtgactagcatagtgcctgctgcattcttgatactcagttatttaaagaatagcatcttgataactatattagtaatattttcaaagacccatctctgggtcccaagtagatctcattgttggattgctaatggttcttgtgtcacattttcaggatcagtaattgttttatagaattgatctgagacttgataatgaatccacgaaaactgtattgaatgtgcttgtggcacagttttttctttttcacttaacatttaaattaggatatgttgtagagggcagtaaagaatagatttatgcttatttttggatactacacaaaatgaatattccttagtattagaattgtttagtgtacagtgacatacatttccaaatgattattatattgagatactgaactcttgaacacacacgtggtttattcagcatataaaatgttttcatttatagatattttaaactgcattataacttatagacatttttaattgtttagatatttcaagtttgtgtacataagttgcttactcaattgactaaaccattatgtgttaaaacttctttttctgcagagatgcaattgagaacaacatggattttatgggattaattataatgcagaacaaattaaagcaagaaacccctgcagtacttgaagatttgcataaagccaacattcgcaccgtcatggtcacaggttagactttataaaagaacacagaagcaaatggagtgtgacagagctgaagttatattatattgagggataatcagttataaaatcatattatatagtctatagtggtttcaacctaagttctcttttagctctgaatattttcccaagcgcaagataactttgtcatattctttttgaggtctagcgaatcctatttatagaaagtgtagtagaatagtaaaagtacggccgggcgcggtggctcacgcctgtaatcccagcactttgggaggccgaggcgggtggatcatgaggtcaggagattgagaccatcctggctaacaaggtgaaaccccgtctctactaaaaatacaaaaaattagccgggagcggtggcgggtgcctgtagtcccagctactcgggaggctgaggcaggagaatggcgtgaacccgggaagcggagcttgcagtgagccgagattgcgccactgcagtccgcagtccggcctgggcgacagagcgagactccgtctcaaaaaaaaaaaaaaaaaaaaaagaatagtaaaagtacactgtaaaaatttaaacttgactcctttttgttttctctctttattcgtatatttcttatagcacttattgtaccttgtgttatttgtagatttgttttctgtactagaatataagattcttgagggttaggagtatattttactcatgttggggtcctttgcaacttttagaactgtcagctacatagaaaatgattaatagatattcgatagcatgaaatgtttatatgtaagatattgtttattaccctagcttgaattctagtgaaatagcctacttttttttttctagtacatctaagggattctcctgatgttactatactgttgataatattagataactcttactcattagctgtgtgaaattgtggtagctctgttttttgtttttttttcttagcagataatcagatttaagatacttaatggcacttacgtgttcagtaagactaatatggagaaagtctgtatacatttttgtgttttagactcttgagatctatctaataacataattttaccgtataactcaaggtaactaagtctgttagcattccagccattcttagttcttgcgtcttctttgtcaagacacttttcacctgttcctcgtcctcctcttttatttatttatttattttccccttgccagaatatggctttgtgtaccaaaggtcataggaagatattcttggaaatagtgtgtggaaattgaggaaagaaatatctcgctcttctgttttggtagcagtgggatccacaaacctttgtctgcttctccttaataagatcctgttcttgctgctcttctttcttctcatgactgagaagttgtctctcttgtttctcrtttacacctgttcttattacctgtcttacctttttgttttgtatgatcttgcttttgtaattcatcattttctatgatatggtgctggtgttcttgcacagaccactagtcactttgtaaagttatttcggtaagtatttattgagccacctgatctgtgtgtagcaccgtgccaggtattgtgtagatacaaatagtgcatgactggaaaagattgagaattatatttggctttaaaaattgtgggtgagatgttttctttagcatataacgtgcttgcgttatttgaggcttcttttgataagtatgctccaattttsttatttttaaactgtaagtggaagaaccatacattatcgttactytgccagcccagtcatggagactgtagtagattctcagcaagtacatgtttgatacgttcacgtttccattttaatttcaatacatttaaaatattttgaaaattaggtgacagtatgttgactgctgtctctgtggccagagattgtggaatgattctacctcaggataaagtgattattgctgaagcattacctccaaaggatgggaaagttgccaaaataaattggcattatgcagactccctcacgcagtgcagtcatccatcagcaattgacccagaggtaaggtcaagatcgactgtccgttttaaagtttgttgatttaaatttagtctgaaaaaataaaaaaagtggtgcattaaaacacagtaaagcaaaaactaaatgaaaacagaagtcagggctattttttcagagattatgtttcattaggactgggacagacccaggaatctcaatgttcaaattttgatatttagctaagatgagaagcatagttttaaagtacaagaattccagatgtttatcgtattcttcaggtaactagtggtaaatgatgcaggtggtccatcatactcagttcatgcatcatttcaaattgaagctgatatttaattgagtttctttttactttgaataaatgtccggctttcatcatgttgtggaacatatcaaatgaaagaattcagttttagaacaaatatgtttaaaatagaattgttttacttggtttggttgcctaaatattgttcccaatgtctcatatacacaggctattccggttaaattggtccatgatagcttagaggatcttcaaatgactcgttatcattttgcaatgaatggaaaatcattctcagtgatactggagcattttcaagaccttgttcctaaggtaagtaatttgggtgtatgtgtgtgctcacatgaatgcatcgcaacagtattttaaaaaaatttgtattattgtttccagttgatgttgcatggcaccgtgtttgcccgtatggcacctgatcagaagacacagttgatagaagcattgcaaaatgttgagtaagtattggtgtcttttttggttttggtttttgatgaatgatggtttcatttcagcatcagaaaaataatttttatatgtttcttatactaatatttcatatttatatatataattgtgatctataagatagttcagaactttaagtgccgctttaaaagagtctcatgtgctttttatttagctaaagtacaatatccacagttttttctctatgacttcattctttcaggtgctctatcttgatagaagtggctaatcattttagtaaacagttatgtttcaggttattaagggataaatttttactgataacgttaaaagtagccatactaaagactgtaggcacaagcgctttgctctaaagatgaggaaattgagacaccaaaatgatttgccgataatgtgacagaaataggacaataacctagctcatttcacttgtggtctggtgctgtttgcaaagcagcacacctgtgttcattatagtgaaaagattcatagttccactgggggaatcttggtgtgttagctctttataatactgtaatagaaaagtcttaataagttaaatgttttgtagtttaagaaattaattaaaatcttaacattgttttgtttcttagttattttgttgggatgtgtggtgatggcgcaaatgattgtggtgtaagtatagtttttgtgatttagttttatagttcttactctagcctaaatcatattcacaaaacttaaccagttttcttaaaattattaggctttgaagagggcacacggaggcatttccttatcggagctcgaagcttcagtggcatctccctttacctctaagactcctagtatttcctgtgtgccaaaccttatcaggtagtacaaattaaaatttttctcatccctttttctctgtctctgataatacagaagagaaaattatcataaaaagtaacatgaatttgtttaatattagcagattagcacatttgagctgtaacttattagtaacagattgattgctactcctcatttggtttagttcttttggtggataagcactttgttgtagccgttgaatgttgatgttcatctgtcaagataaaattgtggtttggaaaaggagtttaaaatgcttctattcatatgccgacatttgatttcttttcacagggaaggccgtgctgctttaataacttccttctgtgtgtttaaattcatggcattgtacagcattatccagtacttcagtgttactctgctgtattctgtgagtattaacattgtgtgcagagataacacttaatgtgcaccgtaaattaagatgttgagcgtatgtgtttgattttgaatgcatccattagtaattgtttctgtgagtagtacctataaatttaccttcaatttactgtagtttgaatagcaaattgaaaaagttaaaatgagaaaagatgtttcaacagtggtttgttgaatttggagaatggtttgcatttggagaaaaagtataaacagcgatggccacaggtaccctatcagattttataatcaaagtgttctgacatcctaaagactcatggtgacactatcccatttgaccgtttgtagaaagtatcagaagggatggtattagatgaagatactaatttacaacgttgaatattttgagtaaatgtttgtgttttctttttgccaaaaaaaccatgttggccagggtggtctcgatctcttgacctagtgatctgcccgcctcggcctcccaaagtgctgggattacaggtgtgagtcaccgcgcccagcctattgaacgaattttaaggagatgccttttatactaatatactaaatcaaatatttataaatatatgttatatttagtttcagagacacttatatttcaatttttaagcaggtccgagtgtcatttttaagttgtcattatagggaaaatccaaactattaataaaacctggggaygctataaaaataattcccaaaaactaataatgtttttaaaattacttctgtagatcttaagtaacctaggagacttccagtttctcttcattgatctggcaatcattttggtagtggtatttacaagtgagtattttgctttgttattgatttttaaagtgtatgaaattctgatgtgacttattaaatttttgtaaatttacatcaacaattgtaacatagctcacacctctccagattccttgtaaatatgttattttattaccagttgtttatatcttgcgccaattttttaattgttctgtctctatttttttccctgaaatatttgaaaataagttttgagtcattatgctcttttgcctctgacaattttagtatatattttctaaaagcaaaaccattcttttatgtaactaaatacagttgtaaagatcaggaaatttaacattgatataatatctggtgcaaaacctatattcaggttttgtcatttgtgtcaacaatgtcctttatgcctattttcccgtagtcccctagattagaacaaaaaatatctccagacattgccagwtgctcctttggggtgcaaaatcctccagttgagaaccacttatctttagtagatgataaaactagtgaaagtttgatgaggagcaggattttcacagtctcaaagtatcttttcacaaggtgctagttacaaagggaaaaatagaaatttctttttttctttttttttttttttttgagacagagtctgtctctgtcacccaggctggagtgcagtggcacgatctcagctcactgcaacctccgcctcccgagttcaagcgattctcctgcctcagcctcctgagtagctgggattacaggtgtgcaccatcatgccctgctaatttttatatttttagtagaatcggggtttcaccatgttggccaggccagtctctaactcctgacctcaagtggtccgcccgcctcggcctcccaaattgctgggattacaggcgtgagccastgtgcccagctgaaaaataggaactttatagtggaaaacttgtgtataccaccttaataagtaatgaaagcctttttgaaaaatgtttctgctatgtttatattgcttcaaacattgtgaatatcgtaagaggaagaagtgtgtattattttaactgtagttttgcaattaaagattcagaatataatggcctcttaaatatatgagatgattaactttatagttattgtgtttatatttagttttactattttttaatttaaaattatttatttatttatttatttatttatttatttatttatttattgtagagatggggtttcactatgttgcccatgctggtctcaaacttctgggctcaagtgattctcccactgtggcctcccaaattgctgggattccaagtgtgagccaccgtgcctggcctagttttatttgttaatattactgctgaatttcaatagaaatgtaaaaattattcctgaggcgtttttcaaaaagcctacactgtttacttttacagattatttaaatatgtacgatatgtggcttggtttttgaagattttttgtattaaagaattgttaggcaaaaacaaatttttaaagttcctaaatgaatctagttatgccttatatagtgatagattaatgtaaatacaaacctttcctctttttcttttcaatatagtgagtttaaatcctgcctggaaagaacttgtggcacaaagaccaccttcgggtcttatatctggggcccttctcttctccgttttgtctcagattatcatctgcattggatttcaatctttgggttttttttgggtcaaacagcaaccttggtatgaagtgtggcatccaaaatcagagtaagttggtcaatctatgtaaaaatctatataaaatatgtgcaacatatatgatataaaaatgagtttagaagttaatataaaagtttgtgccaggtgcggtggctcacacctgtagtcctagtactttggggaggccgaggcaggtagatcacttgagaccaggagtttgatgacttgagaccaggagttcgagaccagcctggttaacatggtgaatccccgtctctactaaaaatacaaaaattagccgagcatggtggtgcctttctgtaatcccagcaacttgggaggcttgaggcaggagaatcacttgaacctgggaggcagaggttgcagtgagccaagagattgttttttgagacaaagtttgcatgcaggctgctttaaacacttacataatttggcttgtatttgcctgtatatcacggtcacgcctgtctttgggaagatgttcaggcaaaatcctaataatcctaccaaaatggggatcttagatcagtttcttaatttgttactgagccttacttatctgtaaaataagaaagttggaattaatctctggggcctcttctaaacccagagtgttttgtatttctaatctttcatcccccagtttaggaaatggcattttaaaacttaaggggaaaaataaattaggtgcatttgcttttcgtagagtgtagagtgctttacggatcacaaattataacattttaattaattaaacgtgttaattttgtagaattaaattttcagatgtaaacatttatttctagtttgcttgactgagggatattatctttaaaatttttagaagattgtaggagatttaacattactttttttatatgtgcgtagaaacactgcacatgcaaaaaaaaaagaggtggaattttcttgagaatcttcccatagttcacttgcagcatagtctgttaatcacgtttcgtgagcacttacctgtgtttataattcatgctttagtaatgattgttggggacttctcatcgttagctgtttctgtgcctgatggtcctgcctacctgaaagtagaaatgagggacagccatagctggagaatattgagggacatctcagcaccggggactcgctaggcatttgcatgagtcaacttgtgatgtaggtaccaacatttaaccagcgaggaggtaggctcagggagagtgaataatatttcctcagttagcactgaaaagtgatagtgcttgggtcaagcccattgtctctgttttcactctgctaaaattactcccaaaattaaaaaaactgaggggggcttattaaatatttcctacttgattctaattttttaagtggttgagatgtcggactgaagagaaaacccttcatactcttgtacctgttttatatatcttatattgatattgttggaccttttgctgtaaatatcatatttctatttgttatgatagtgattcagggcaattaaggtaagattggtttcttttgggaaatgagtattatgtttactaatgcagacattttttgcatgtgttctagtgcttgtaatacaacaggaagcgggttttggaattcttcacacgtagacaatgaaaccgaacttgatgaacataatatacaaaattatgaaaataccacagtgttttttatttccagttttcagtacctcatagtggcaattgccttttcaaaaggaaaacccttcaggcaaccttgctacaaaaattgtaagtttggcatttattgtgatttccaccctgcttgcccctttaaaactaatgtagaagagaataattataactgtctttgccacagtaaaccagatcttcacagatagaatcaacttagtgatttagatgtttaccgttttgttttactttcattggtagttgccaccctaagtttaaagttcaagctaccagtgttaagcactgttgtttttcacatcatagtgcctctggctccagcttttatttctgcaacccattgtggagggagttaggatgggaagtggagacggaggttcctcagcccactgttgggtgagttaggatcgggggcggagacggaggttcctcagcccactgcggagggagttaggaatggaagcggagacagaggttcctcagttggaacagtaggtattatactttcctcccgggcggtctgcgcagcatctgccatcttcttcatttccgacgctggtgtggcctgtgttcacctctgggattcttcatttctagtatctttgcatgctattgcagaaagggccagtatactgaatggaggcctgtgcccttgtggacttgtctatggcaatagaatataccattttgattgatcaaaattagagtttatggaaaaaaatcagttactacatataaattgccaattaaaaaaaattgagaatacactaatatatggaacaacttttagacttctgcagtatcttggagcaaatagcaattattcttttgctgtagttatgactaggtggcagtgttctagttggcaggtcacaggtatcggtatgtcataggaatcacaactattagtgtctctgtctcatattagcatttataaggcattttctcatacattatcttatttgtcacttctaccctgttggtttgtagggcaagttttattactttatattttgtgcaggtaagattacaatctgatctcactggtaatttttccttttttttgccccctttttggaactgatgtttcttattttaaaaataactatattattacttatttattgttatatattgctatataactatactaataactgtgttactaagaactttaaaaaataactattattttaaaaataactatattatttattagttgtgtattgctgtataaccatactaataactatgttactaagaactgtattagaaccatrctacaggatgaaaaaccttccatggaaggtttgccacggtatttctaaaaggattttttactacagataacttattataaggtgcatttaatcattagcattggtatacattttattcaacatttttaaatttcaaggaaatgttgaacacatgtaagggtagctgaaaacatctaggaaaaaacattgcttttttttttttaatttgaagaaaactggtattcagactggtttgcaagcaagacagctctatcaagaaagttaattttagagatctaccctatccacactgttagaattaaaaaagagaaagggagaatattagttgcctgtttctaaagatgcatcttctatatgtttggaaaacttattaaaaaaggtttaagaaattttgttttctcgtttaatttccaatttactagaataaataataaacactatttttggccactggatgatttaaaaatgtactaagattatatttagcagaaatataaccataaaactcgattgccgttactgtcagcagcttgtgtacttctctcagtgggtaaacagaagcacttgctgttgtaaagcatgccttctgaaaagtacgaaaggagcagtgcagttgatgcaggcattctgccagttttcacctcttgtctgtgtgtcactggatccatgcagagtcctttctaggacctgtctgttagttttcacctcttgtctgtttgtcactggagtccatgcagggtcctttgctaggacctgccagttgttgctctctataaatggtgtgtaatatattaaaagtattttgaagttatgatttttaagaattaatctcagccttaggcgtttaaggaattctctttagagttttttgctttcttgtactggttcacttttaatctaaattaaacttaacttcagtctgtgtggttacctgttttcaacttgagcttcacagttacattttctcattcagctgccttcatttcaagggtcatgatatgcacttaattcttaacactctcctttaactagacatgatttcttgggatttggcttcaatttttaatgcagtttcttgttggatcatccctacagtttattgcttgtgctatctaatccctttgtctatgaaggcattactactgaattgccagggtctttcctattcagggcctatgtatctttttcctattcatctagcatgcctaaattggttgaagccattcagatacctagaggccctacagaataaggtgaccttttaaagacataactggataaggggagagggataggaataaaaaggcttaggatttgtggctgtaggttagttagtactagttattgtttggggaaggaacaaagagatatatattggggtaaatattgtatgtgtgtctaccttatttcggagtcactaaggaaaatatgaaggaaatcctttctggtaccttattttgataccatagtccatcggtggcatctggtatcatgaacagcacatcatatgttgccacaagctgaaaaatatttcataataacttcaatttacatgttgctatatactttgaatacktaaaaatctcttatttcctacagaatccttatcatatccccattttatagataaaataatttgactgtaaatgacttgtttagattcacatagctttgtggaagaatcaatctaaaacaatctaaatcttaaggaacacccttgaccctggcctgcagtcaccagtgacacacagtttgttttgatagctgtcttctggtgaagaatgtttacactttagtacaattactaagccattgcttataatgctaggagaatctaggagctgagagcatagtctacaagaaattcatacctctctaaagtgaatacctaattcttctattcttggttgaaatccttactgattttaaaatttggtatggttgtatgtctgccagccatccttctctcccctgtcacttagtgtcttttttggatagtgccttttttttttcctccaggctaaacaaagatagattcagttacttatcttctctctcacatggaaatcttggcagatttttagaggtgggatccaagaggtggctctgggagagacatgaaaatttgagaaacaaacattgtttaggtagatgtaaagaagcttctgtgcttgagtaaattttttttttttttttttgccaacgacacacatgtcaagaaccaggtcgcaaatctgtttttgctgtggtttgaaaaatgcaatcagatttgaaaaacatgcaatatggcttattacttcattgaatttcttttttagtctccgtgtttctctctgccatttatgttctgaccattgctttttgtcctttttctgattttgtcttttttcttttctgtttttatatacttccaaccaccactttccaaacactttttccttatctgaccataactacttaaatgaccatagaacttacatgatactttagttgctgcatttgtgaaacaggatgtcacatttcctatttacaatttagtagaattactttttacccaatatgagtcccacttttttttttttttttttttgagatggagtctcgctctgtcacccaggctagagtggagtggcgtgatctctgttcactgccagctccgcctcccgtgttcacactattttcctgcctcagcctcccgagaagctgggactacaggcacccgccaccacgcctggctaattttttgtgtttttagtagagacagggtttcaccgtgttagccaggatggtctcgttatcctgacctcgtgatccgcccgcctcggcctcccaaagtgctaggattacaggcgtgagccaccgtgcccagccccacattttttttaatccttttggtcagtggctcatggtaaaaaatatgtctccacctttggtataagtgttagtgtaagtttcagcctaagctactaaaactatatatatatatatatatacaccctacacactggtatatataaacataaaaataatatagtatagtttctgtagaatgataaatatttacctgtagttttgaattgatattaacaaagtttatatttacaaataacatccacgtttaaaaatggcactgagacccttcatttacagtcagtaaaaagtaagttctttacccagtctggaggcttcatgataaagtttttgtatgtggtcttagtaaagtttgagtttgaagtggagttcaaataggaagttgtaaataaatgtccagatcaaaggaaaaggggaaaaaagtttgggctatcaatatattagaaaattttggagccacttttatggcttattattatacaagtatatgcttatatacatgtgtgtatatgtgtagatgtacacacttaagaaaatggccatgagcaagcagtttggtttttgagttaggaaagtgagacaaagtactgctgggtggatttgccattcccagctcccatagcaagccataaggtcagcccactttgaaaaatagtagatcaactcagtctcttggcttttggctaagattttctgtgaaaacattttcacagtgtaaatcagtgaaaaaatgggattcacttactagaaatacatttacatttaggttagaatgcctctatttaggattaagacatacccaatactgaaaataagtgttattcagcatttttacagtcaatagtaattgtcattgaatacatgttttaaatgataatctcattttgccacacatagtttagtctcttatttgtgcattatgtattggctttattatcttacaaagtagctatccatttgggcgacatacaaatgtctgtgaaggtctgagtcttatttttttaagtgctgattattttctgaaggactttcacggttaaagytaatggagtttaaacataacatcacgttgtgtatgtgaatcttttgggtgccccgaacaatgtctcatactccaggagataacagagcacatactttattccatcaactgaagtgaaagtattcaaaaccaaatttacaaatgacagtataccagctgttattggatgcctttttatataaaggaatttcctaatttacttgttttacttttgctgtcttttccagatttttttgttttttctgtgatttttttatatatttttatattattcatcatgttgtatccagttgcctctgttgaccaggttcttcaggtaagacttaagcacatcatttgtttggggaaaaagactaacctgtatacatttctttttttccaggatctcttctttttgtgtattctaagatgctgttatattaacccaaagatactctacagagaataaagaacctaatgaaaatagcagcttttcttagctatacctgtttaatctctgcttctggtgccgttttcatttgtctgcaaacaaattaaatagcccttggtctttaaaaacataaaaaaacgttgatcctggtacctgttactcctctcttctctaccagtctacttcttgagtagtctacacatgctcccttttgtgttttggccatttagttcttcaattcttttcattaaaaactttctgagtaatgaaatacttgtttttcatacaaaagaatatgcacacatatttaagttgttagccataattaaaaaatagtaaagagataacaccctgagtgtatcatccaacctgaaaaaatgaacattacctgagcacaagtcagtgacaaaagaaaacaaaaaaaaggtaacgttaccaatcaataaggcactctcatgtacctgttttgatgattttccctgtcattccctgtttcattatatacttaccatatatgtttgcagtcataaaagatagttttgtgtgctcttgaacttcatgaaaatgttatcttgttcccttttttctgtgacttgcattctcccatcaacattgtttgttgatacattattttattttcattgctgtatagtatacaattgtaggaatatattaaattcatttctccatcctctgttggtaaataattactgaacatattgctgctatgaacatatttttacatgtctttcagtgtatgggggtaagtaatagtgtatgaaagagtggagtaggagtggtttatcccaggtacaagcagtgagagagtggtgcgatgctgtagagaatttgcaaacagtgattaagcccagtagaagtccatctgctttttaaatattgccatgtgctggtaattccagacacttccagtggtaatatactccttccactactacccttggcaaaccattagggacaaaagtttcctctgctgtattctggtatcatgatgagcatgtactcttcagctaccacgtgccaagttgttttccaaagtgattgtatcaatcatccatcagtgtttgacatcctgttgtttcacatcattgccaacacttggtcttgtccagtgggtgtaaaatgttatatcatgatggttttactttgctcattaactttactaatggagttgagcattttttcatgtgtttaatggccatttttattttctctgtgaactgcctattcatgcctttggccaattttttctaggatgttgtcttttttaaaaatttttaggatgttgtcttttttttaaaacttagttttcagagttcttaatgtattatatttgactgtatagtgataaatatcttctcccagtttgtggcttgtctttttactttgtttataatatctctttttaaaaaacaaacttatagtctgacatggcaaatttattaatttctttctttatttgttcctcgtgtctcagtttggcggacttgtccatctcaaagttataaagatactctcacatttagtctttaatccatctggaattaattttatgtatagcttttgaatagggatcaaatttctttttctttttttctcttacgcatacccatttgtttcagcaattgcttattgaagtttgtctttgccactgatattcagtgatacctttgtcttatatcagtttccttccttccttccttcattccttctttccttcctcccccgcctcccctctcctccctccctccctccctcccttccttccttccttccttccttccttccgtccgtccgtctgtctgtcacccacgctgcagtgcagtggtatgatctcagctcactgtggcctcgacctcctgggctcaagtggtcctcccaccacagcctcctgagtagctgggaccacagttgtgcaccaccacacccagcaaattttaaaattttttgtaataaaaattataaatggggtttgtaatggggtttcactgtgttgcccagtctgacccccaactcctgggctcaagtgatcctcctgcctcagcctccgaaagtattaagattacaggcatgagccatggcgcctggccacagttttccatatatatgactaatagtgttttagggactccatattttgttgtttagttctctttatttgtgccagtactatattgtccatgctaccatgactttataagaaaccttgatacatgcttgggtaggactcctacccccctctcacattgttgttcatcatgacctttttggctgtgcttgagctttccttcttcctccttttgtgtgtgtgtgtgtgtgtgtgtgtgtgtgtgtgtgtgtgtgtgtgtgtcagaatctggctctggtacccaggctggagtgcagcccactgcaagctttgtctctcggattcaagcgattctcctgcctcggcctcacgagtagctggcacctgccacaacgcctggctctaattttttctattcttagtagagatgggttttcaccatgttggccaggcttgtcttgaactcttgacctcgggtgagctccctgccttggtgagccactgtgcccagctaagcttttcttcttaacttttaagtttagtttgtcaaataccaggaaaagccctttcggaactattagaattacacagagttgatcaataaattttgagggtgaattcattagttttccttcccacaaacagtatctcgttctgtttctgtctttttgacctaatgtctttcagtaagtcagatagttttctccctaatggtttttgtacattttttgttagattcttagagtaataacagtttttgatcccttgataaattataattaaaatgacattttctaattttttatgttgttgaactcaatacagttgttttagatattcatcttgttcccagaagccttatcagactttattcagacacattttagattgtctaggattttctgtttagacaggcatcatatataagtaattacaagctgtaattacttacttgactccccagcagtttgtttctgacatttcacagtctttatgtgctttttctgtatttttcatgtcttaatatattagttatagtgatagtgatatccttgtcttactcttgtctctaaaggacgtgttcctaatagttcaccattagataaactgtttgctgtatatttctagtgtatagtctttatcaggttaaggaagcttccttagttgtacagtgttgttaacataagtggttttaaatttttatctaatgcttttttttttgagatggagtctcgctctgtcgcccaggctggagtgcagtggcatgatctcggctcactgcaacctccacctcccgggttcaagcaattctcctgcctcagcctcccaagtagctgggattacaggcgtgtgccaccatgcctggctaagtttttgtgttcttagtagagatgggatttcaccatctggccagactggtatcgaactcctgacctcacgatccacccaccgtggcctcccaaagtgctgggattgcaggtgtgagccactgtgcccagccaatctaatgctttttctgcagctattgaaatggtcacacagtttttctccctgaagaatgtgatgaattatagctgatcagtattcaaatattgaactaactttgcatttctagaataaattcagtttggtcatgatgcacactctttgaaatttggatttaggttgctatgattttgttttggatttttgcctctgcatgaatgagatcagatttaattttcttttcttgtatgttacggacaggtttgatcttaaagttatataacttaaacttacaaagtttgtgaaatgagtattccattgcagggactttttagtaatttgtttagtcctgttttgctggatatttaggttggttccagtgttttgctattagaaacaatgtggtattgtaaggagaatggtgtgaacccgggaggcggagcttgcagtgagccaagatcacaccactgcactccaggctgggcgacagggcgagactccgtctcaaaaaaaaaaaaaaaaaaaaaaaaaagaatgtggtattgtaaatccttgcacacttcagttacagacaaatatatatttataggctaaatatgcaaaagtggaattgcttggtctgagggtatctataaatttaattttcataaattctgcattattgaactttgaagatgttccaggttgtagtcttaccagcagtatatgtctgtttccctgcatatttcattgaggggtttagataagcacttacagtaaaagaagaaaacaaaatgcattatatttctctcctggtgcacatgtcttctgtttcacaaccaactttttcttgaaatagtaccacattcagctcacctcccacacgttcgtcaactaatctggcatcttcccctgccaatctactgaaacggccctcagcaaggccgttagcctcttacttgttaagtccaatggacttttctccctaatgtatttttttccagtcttacttgactccccagcagtatttgacgagttagccatgtcatcattcttaagatactctcttctgaaattttgtgatgctttgctgtcttttggccttttcttagctctgactctccagtctcattttccactttggctccactccctctgcccattccttaaatgttagggttccttacatttctgttcttattcctctggtcactcaatacattctggtgatatcccctagagtcatggcttcacctgtaatcaccatctatatgttaaaggctcccaacctttataccctgagcctacctcactactaagctttagacctgcaaatacactgatatattgactgttacttgggtgttccacccaacagatccctcaatttaaacattttaagaactaagctcatcatgttctccttcaaccctttttcttctctgtttcttggtaccactatttattcaagtcrgaagtgtgcatgcttgtgtacatgcgtgtgtgtctatttatctgtgccttttcttcctctttccgtagccagccatttgttagattctttcagttttcttattataaacctttctgtctttacaactatcccattttttaggccttagaaattaatcagattttaaagtgaacacttagattgttttttcttaacttcatctttttttatgaakttgtctttataattgagttttgaccagtacttcgttattagattggtacctctttttttttttttttaaggcaggttcttctgtcacccacgctggagtacagtggcaggatctcggctcactgcagcctccacttcccaggctcaagtgattctcgtggctcagccttttgagtagctgggattataggcatgcaccacctcgcctggctaatttttgtatttttagtagagacgagattttgccatgttgcccaggctaggctcaaactcctagcctcaagtgatctgcccacctctgcctcccaagatgttgggatcacaggcatgagccactgtgcctggctggtacctcattctttaaagatgggtttttattttgaaaatagaaactgttagacattcatgatctagtagagcatgggcttttgaatctgagtgaacaggatttgactctaacctcagtcacttaatattttctttaaccttgagttacttaaactttgagttttatcatctgaaagggaatataatatataccgcggggcattgttgaggattaagtagataatgtatatgaaggtgtttggtacatcataggaattcaataaatttagaaattatgatacagtgctataatattgactacatacaacaattttaactttaaaatgtttttgcattacagatagtgtgtgtaccatatcagtggcgtgtaactatgctcatcattgttcttgtcaatgcctttgtgtctatcacagtggaggtaagcacttccatagtcaaatggctaccatgttgctttggaattcttgggtgatttaatggtaaatgggagaagagggcaggtaatataatggaaagccacagagtctcagtttcatctcaggcaaattcatttagccttctcttgtgaacttttccatgaattgatagtggtcatattaagggaggtgacttagttgcactcacacagataggagaaaataagcaatgtgataataaaaattaatgacgagtagaaaggagagaagtttggggcctcggtggcccatgaaactgatgaaccagtgattgtgaaatcagagttggcatgtgccacctgtgttttgtgatgtacagtaaaatctcccatttaagggaggggggaagggggagggccattctccaggaaacacagtgaatattaatagcaagagagtttaatgaaagtataaaataataatcgttatggacttacctaatttcagcattgattactggaacatcctccttggyatttgcttttgagtgacctctagaggtcttaagtaccctttgattcactgtatattgtgtagttaccctcccgttaggattgcctttaggttagcgtctctaaaaggaggtagcaagttctcattggtggcttattaataagcttttgtctgctctctgaactactatcataattgactcttacagtaactataaaaatggaagagagagatacagttgtgatttttaagttaagagtttcatagcacaggcttttggatcaaaataaaggtaatttttttgagaaatatatatgcatatattttagtgataatagctctggtcttagaaattacacttaatttcaattaccccctaaaagatgacttggtatttaaatttgggatatgatgggcagcatggatattatggtactgaccttttgaagttgcccattgaaatgtgattttttttctattttatgggtgctaggaagcacatgtaagatactatattcttaaaatgtttctttttctacagtatcagttcatcttttcacagaaatgttacttattcttactacctaaagaatggtttgtgttggatgctgatgaaattatatatctatagatagggatatagaattagtactagatattcaatgaaaataaccattgtgaagaaagacttcaaattacataagcatcattttaatatgggaaagacctatttatacaaaagccatatttcatggaaaatttagaagtctcattttatcaagaattttatgatgatttgtatttgttacaaaagtcctatcattcttgatcatttggcagtattaactgaaattccatatatgaaaatcaaaatatccttttcatcaattatgcagcatgtgtgattttttaaaaaggtgcacattaataaaaaatgacttagtcattattaattcttaactcactggaatatctctcagaacttcttccttgacatggtcctttggaaagttgtgttcaaccgagacaaacaaggagagtatcggttcagcaccacacagccaccgcaggttggaactcagcacttcctgtcaattcttgctgcctctctaggctctctgcttgtgtactctgtattctctagcgtgttcttgttctgttatgtgttattctctagcgtgttcttgttctattacgtgttccttcagcctttttctctgtgcttggcatttcatttcttataagaagtcctagaaaattcatggcaaacatttgttagaggcttttcaagatcagaaatttcataagtctcctttccattccaatcctgatcttctatttgtgtaaaagtcttgtcctcaaaggtgagagttaatttttccatttcaatctactataaattttatgtttttgtttttcatgagtccccttagaagctaaatgagatttatataaacaaagtttgcaatgaaaactgtttcttcttggatcagagtccaaaggcccaaattctgaagaattatttctgatttcttgtcagttactgtcccttaatttggagtggctttttggctttctccagcgttgtataccttagtattcagaagatgatgtccttttttcatacaaaccgtggtttaggacatttgactttttgggtctgttaaacagcctgtcatttgaaaggtattgcaagttctgtggtaaagagagaagagaaacagaggaataaaacccatttcctagtgttaggatgttaaagtatagctcttgatacagatacagattggacttattttttaaacccatcctatgaatcagagctctttgaggcagctttttaggcatagagaatttgataaaatctcaccccttcattgccttacccatttttctttagagatgggtgatgtgctttacagataggagctctgagtctttcactcagccttgagccacaggaagctggtggagttgaagaggactccctggcatttttgagttgggttacccacttagttttagccaacttttacctaagtggtaccttcctgagctttattttggtcatccagcaggcctgatgtcctggtgtaatgccacaggcttgctttctaagagggcctgcagagtaccatttccgttttctaatgctttatggtgaataatgatggaatgcagtcagcctcagtttttttttttcctgaaagcagtgtaataccagttgtccctagtagtgcgtatgactagggttgtacaaggggctcaagtcgtttagcaaaatctcatctgtgtatmcacacacacacacacacacacacacacacacaccccaacaccccaaccctcccacccccatatatatagttacctcactgcattacttcagaaggttatctttggcttatgtaatcaactctcatgtgaaatattcgtattgtattcctaggcctaggaaaacattccgatttttcatattctcccaagagatctctgactattgatctgaacaagaaattgcatgttttgaaggggagtaaccccggtttagctgaaagtaggcattataaggccccttaaaaatatttggattggaagactctccttgcttttcaaccaaaattaaatgatagaaaattctttttttggtctctgttttctaaaaaattattaggaaatatctgcccttctctttttgtgagaccagggtctcactctgtcacccaggctggagtgcagtggcgtgatcatggctcactgtagcctcgagctcctcaggctcagatgatcctcccacctcagcctcccgggtagctggcattagaggtgcatgccaccatgcccggcaacttttgtttgtttgttttgtagagatagggtttcaccatgttgctgggtagatggaactacaggtgcatgccatcccaggcccagcagttttttttttttttttttttttttttttttttttttgcagagaggaggttttgccatgttgcccgggctggtctcaaactcctgggttcaagccatctgcctgcctcggcctcccaaagtgctgggattacaggcgtgagccaccacgcttggcctgcccttctaatttttagaagtttgtgtttctacctctgaagtgttcatgggagagtgaaggtagagagtggtccagagcaggtgggccccagcacaccctgtgtgtcaactgattctgagaatcatcaaatagacaagaatttaagtcttccgtttctgtggtcatgattaaggtgcattttttaaagacttaaaaacttactggctttaggaaggagagttcttataacctcccagcacaaagtgacatactttcattctctgctacttctgtgtagtgttgcttcactgttaatgtttgtggctcttcaagagccagtctttagttaatcatattaccataaggccgtggttctcaatcggaggtgatttccccaggggacatttggcattgtctggaggcatttttggttgtcacagttggcagccccgggtgttaatacttactctctgaccaaaaaaaaaaaaaaaaaaaaaaaaaaattctttacgtcagtgattatcaagcaagattattcatcagaaatgctttgaattctacccttgacctactgaatggaaatcttcggtggagacccccatcatctgtggttttctataaagcaaccctgtttcaggagatctgtgtcgtatcttctctttagaagcatttgtgcctagcttgtgtctggtaaactgagggcacttagtagtggaactagaatcatactacctgtaatttgattatgcctgaggatttgtgcccaatttatgttttcttccttggtgaaaaatccaaaaaagtagtttgtatggtgtagtggtagtctttatgccacttagaatattatttgagcttatgtagacagaatgttaattctgattttctgtgtttgttttatattcaggattggtatggaagaagacttatgaaaaccacagcgccattataacatttttccttcaagcatggcattctgttttatatactgcccatgaaaacatttcctaaaagacattgctaagcgtaaacttgacatttttgaaagttctttttagtttctctgctaaactatgcatggtagcctctttccttctctgaggggatgaatttggtcactgaagcattcctttcagaaacaaactgaaagatccggttgctatagctactgtgttctgctttagggacttgtgccgtagaggttttggagagacccacatgctcattctgtgcccccgatgccctgtttcatggcctttgtgttacacagtacttgcctttctcccttcatcatcatcatctccccgctggctgatttctcattccagcatgcctgtagcaccttttattttctcttccagtgaattatattgtgtttgagaatgtgtgtggtatgtttgtgtttgtaaactaacaaacctatgcttgcatgtagtgtactttttgtgtatgatacttgggggaggtaggggtacaggaacaaaatgtttccaattatggtacagtagggggatccttagtgttcctcatgactttttaaaaattgtgacacgtgtacactgtttgtaatagggttgtgaggatatttttcaatgcataaaaagaatcctattcagttattgttctatttgcaaataaattaattttaattttattggttgacttactttccacaagtagggaacagtgaattgagatatgtgtgtgtttggctttccttaactcagcttgctacgtacgcattgctgttcaacctggcagactctttggacagacaagtcctattatgtttctgcttttttaaaaaaagtcagcagtcaacattagtttatttcctgtggtaatctaacagtgctacttaaaagtgacagcttttggccaggtgcggcggcttatgcctgtaatcccaccagcactttgggaggctgaggtggrtggatcacggggtcaggagatcgagaccatcttggccaacgtggtgaaaccccgtctctactaaaatacaaaaaattagccgggcrtggtggcgcgtgcctgtartcccagctacttgggaggctgaggcaggagaatcgcttgaacccgggagacagtggttgcagtgagcttagatcacgccactgcactccagcctggcgacagagcaagactccgtctcaaaaaaaaaaaaaaaaaggtgacagctttcgaattgatttaggaacagtggtttttttcccacaattagattgacaaatgacaccttgggagaaaagtaagatccaagtagtaaactgtcatctcagatgaaatattacgtttgttgtgtgcctatactggaaaggcattatctgttattttggatcacttgaagaatcctatacatagtgacttctgtaccttaatgctaaatattttcctgtggactttttttttaaggtgatgctgatataactctctttagttatgacagtaaaaaggctactaggcgagtaatcttcagactttccccgtccccaccccagaatgccacgtagcttacttttgtccaccktttttgcctttaaattcttggtagcagtgcagctgattgtgttttgttgacaggcttaagctagcagacctttaacattgagagcggtgagtcacgtttaccgtgctctcagcggggccagggaggagagggagagagtggtaggttcctgatggttgtttcaactggatgagaaagagctaccaagttaatatgaaaaagctttaagagctttaattttaaagtatttttgctcttctccattggccaatttagaaacatgtttcaaaatacatctatagctaacttgcctttttaaatcatgaggcattttgggtaacattagaatatgtagctcagttatgttctactctaccttgtgagattactgcatttagagctagttgtagcctggtttatatgttgattggcaaaacaaaatgacctggaatttaaatttcattttggagaagcaacagccaaaatcattacgaagtggctgttctttagaagtaaatataactactacgagtcctggtgtagtcatttatatttatttcaaatttcaattgagacaaattctgagggcccttttcagccctctattgagtttacatttctatgcattaaccagggactctgctttcttgttctccaaggatcatttatctaaggccaaattcactaaaaacatcaggattgatcagaaggatttcagtgacagcagagctttttgcaatgaaataatactaagcaatagtacttgttttatacccctttccagtcgtggagcaccgacggaaaccatcattataaaacagtattgttttttatattagtaaggatgaggttttaaaagacgtaattgacattaaacatgattgaagccctaattttgaccaaacgatatttacttcatgttttgagagatgatattaacagtaacaaggatacttgtacacagctttcttccaaaaatgatcatgcggctaagttgccaggagcaatagtaccaaaagatagtttgggacagaatgtgaagattttcaaattaaatattaaaaatgttttctctttctgaatggcttaaagttcttaatacattagatattctgtggtaaagaatccatatctgcaagttatttaaaaggtattagtacacaagagtataggtatataaaactaaatgaagtcaatcatattgattatccccccaaaaaaaatataatctaaagaataatcagttcctaaataattgaaagctgcccttacaaaataaaacaaaagaacacacatttcgttgtgttgcccaggctggtctcgaactcctgggctcaagcagtcctcccacctcgacctcccaaratgctgggatttcggacatgagccaccacgcccggccaaagctgcctttttttaacatggatttttttttcccccattcgttgtgctcagaagtcatttcctcttatttttctctgctaatgtgtgctttaacaaacctgtttaaaacgacaagcctttaatcaactggggtgttttgttttgtttttttcttattttcttaggagtcagtggatcggtggggaaaatgctgcttaccctgggccctgggctgtagaaagaagacaccaaaggcaaagtacatgtatctggcgcaggagctcttggttgatccagaatggccaccaaaacctcagacaaccacagaagctaaagctttagttaaggagaatggatcatgtcaaatcatcaccataacatagcagtgaatcagtctcagtggtattgctgatagcagtattcaggaatatgtgattttaggagtttctgatcctgtgtgtcagaatggcactagttcagtttatgtcccttctgatatagtagcttatttgacagctttgctcttccttaaaataaaaacagaaaaatatatcgtcctaacagttaaattaacaatcaatccataaagtcctatatcttcattcagcaacccaaatattacatacatttccagaattttcttgattgttactttcagtgatattctttatattgggtacaggagaagtttggtgtttggtaggtttttcaacattagtttttgagactagtttacctcttcacatttatgctcacaaccctcttgttagaaaagtctgtgtttatatacaggctgtaagtttgtgattgataaaaagaagatgagtgttaattagcctccagtgaaaatatactgaaagcctgttttcatttgattccaatgtttcttccaaagaattctgtataaacatatgccaattccctatgatggtctagagttaggaatgagtgtttatggtgttgcttatagaacaactcaggtaatctccatttctggttttatattttctgtacaaactgcctgggttttatttttctaatcagcaaggtgcttcactgccttcttgagacgcctctcaaagctcttaaatggctcctgtgctatgtgtggtgttggcagtctaatttgcttctgttaaatgttgtagaacctttttcactaggaaataagattcatttctttcggcagtagatgtagattcatcttttaacgtttcttcaaatttgtttctgtcaggctttgtgttattttaaatggttttttaaaattttcttctatgttttcaattacctaaagacataggataatagttttttttaagttagaattttacctcataaaattttttgaggtttgatgtatgtctctgtcttatcaataatgaggcttaaaaaatactggatttgaatggctgccgttttttcaaagcaatatgaatttgatgagtttgttttatgccattaggtggcgccagaggtcagaacatgtctattttgaattggatcrttacaaatgagcatatttgatgcggaaatttctgggagaaaaaaaattgaggaaataaagttaaaaaattgacattcattgagccaaaagagatgtggagaaacatttttcacctttctgtttggcctgattaacatttaaattcttgccaaaattaaggtaacttttaaaaaacaccttttataggtggatccagcagtctggcaacgcccacagttaccacaacacagaaaactgatcgtgctataaaatggacgctaaactatgaaaacagtgtgacattgttctctgttcttccagagccagtaacatgcttgctcgtgctttctacttctagctgatcattcttttcccaacatatatttacaaatttaccaaattttacctagaattttaggaccaaatggttctcactctttatgctgcaaagacctggatgatgtttggtaactatagaaaaatagaaattacactcaggatcactgttactgctattgccactgatgattcctgcaaaaatataatcgaagttttccatcaaatgtataatatgctattaatacacattagatgataacagttgttccatgaatgattctatgaagctatgcatcttagacctcttgagctgtgaattagcactattttctatagttacttattctctggatcattttataatttccatattaatttcaaatatgctcgtgttattcttcagtgatttccacaattgtgcattttattctttggtttaagtactgaagcatataatgaaagtaattgctaagtagcagcttaaaaattcaattatccgattgtatttaacatctttaagagcatgatcataaagagctatttttgacaccccccccccacttttttaacatttagagttartaagggttttatatctcttctgtccatattgttttcaaaggaatgaggtgtttaggtggctggaaaagcatttgtaggaagttagatttgaatatagacaaggtgggttattcacgttgagaatgttatttgaagaatgcctgtgaagccaggtgtgggttctactcagtgccatagatagactgagtcttctctcgtaggtyaccattacatagtaattttgattctgaatttcacattaaattatttgagtttatacagacctaaattttaaaatctgtacatatattattttgatgtattaagatgaatattgctgatttaaattttatttatgcacatacttaaaggacagaaatgtctgggaaagtaattgttaaataatgatatgtaactttttaactttttaaataaataacaagatttttaatgtgtgtctccctcagggttgtttaaagttttttttctccctcaagtataaatagtggtaactatatgttttgtatcttctagcaccaactgctgtaaagcaatgctgcaaataatgcttgaatacaagtggctaagccaacaacagaataaatacttttatagtagttttataatcctgaaattcgaaagctttcccaattgcacttgcatctaaacaaaactgttgcagtttttactctatttattttgttccccatgtttatgaaagtcctgcacagtttcaaaggcatggtaaataatatatcaatgtttatgtagtctgttacagaaacagctatagataacattatccagtgaagagcaaaattcaagctttagaaaatattcatgcatgcaattttgacatatctaaaaataggtttttgtatatttatggtgggaggtggttgggaacttttaacaaaatggggtgttaatttttgtacagtctgtgggcatttacacatttttaatgtattaaaatttggtaattatgtgtacattaaattaataaaagttacttctagttatgatttgtgaattccctaagaccttggatttttttaagtaactttatatcagaaatgatactgcatctttatatttttaaaattgtattgctgctcaagaatggtaccctcttgtcaaaaaggcatacattcataattgtacattcagcattgtaaataatcttatgaaaccttttttgattgaagctattcaaaataaaaattttaatgaatgaaataacactttttttctgtgtctttattcatttgtttgctttttagtgacatgaatactgccctttgtggatttattttcctgcctaataatacttccccatttccttcttttttttttttaaaaaaaactggattttgaaggaaataagaacaacattctgcatatcatgccatgtgtgtgagcatcctggggaaaccccacagtcggatgcagtgtagagccaaatgttaaatgcgaggaggtctgagggcaatggtgaaatgaaatagaagagtagggacttataatctattaatagttgggagaatcaaaccaaaagctaataccatggagagagaaaatggttgtaaaaatcccagagaagacaggacctttgtgtgtgggtgggagttgtttccatggagctcagctccgggagacacggagcccctgctagggaatatgtggctggctgtggtgtgatgaattcggggggtgagggcctgcctgcctttagctcaagttcttaacagtcgctatggtttgtgcggcatgtgtgatcctgtccccacagcctgctggtgtgggcacagttctgcatgtctctccttccgctgtatcactgccaagggacagggwgtcctaggggcttgagtgagactgtccgtggtccaagttggggtgtggttgctccctgctgtgcccggcccactgagtctccctcagaggaaaaaggcttatctcacccaggcacagacctgcttttgaatagccaagccccttaagccaggtaactgttttacagcagacttctgacctggtaatggatacagaatcttaagacttggaagcactggagctgtcaacttccttgctccaaatacttctcattacctcatcaacttgctcagtggatggactaagagtgttcccccactctgcaactgccatacctacttttcccttcctggacaatcaaagtgtcttcctaagggacaaaatgtagaggccattctgactggaggttttcctggggaaataggctaaagaagggccacaggaatttgagccatcggcatcttactctgtttcacagctcgccttcccagtctgtcatgttggctccctggcaatttcatgggcaagggggcggggaggctttcactcgatgtgcctatgcatgacggacttaccaggtcaccagtgtagcagttcagggctctggagttgcattccttgatcggaactgaaagacctcccgcgatacctggcagaggcagtggctcttccctgtggtccagggctgcgtgactttgaaggtaatttcagtcaacccagcctttactgggctctgactgcattaggctgcatcaaaggggattggatcccatgattctttatatcttctgacattaagcctttgtcagctataggtgttacaaatatctttagtttgtggtttatcttttccccttttttatggtgtcttgaaggatagaagtcttttttttttttttttttttttttattgatcattcttgggtgtttctcgcagagggggatttggcagggtcataggacaacagtggagggaaggtcagcagataaacaagtgaacaaaggtctctggttttcctaggcagaggaccctgcggccttccgcagtgtttgtgtccctgggtacttgagattagggagtggtgatgactcttaacgagcatgctgccttcaagcatctgtttaacaaagcacatcttgcaccgcccttaatccatttaaccctgagtggacacagcacatgtttcagagagcacagggttggggataaggtcacagatcaacaggatcccaaggcagaagaatttttcttagtacagaacaaaatgaaaagtctcccatgtctacttctatccacacagacccggcaaccatccgatttctcaattttttccccacccttcccgcctttctattccacaaaactgccattgtcatcatggcccatccccaatgagccgctaggcacacctcccagacggggtcgtggccgggcagaggggctcctcacttcccagtaggggcggccgggcagaagcgccccccacctcccggatggggcggctggccgggcagaggggtcctcacttcccagtaggggcggccgggcagaggcgcccctcacctcccggatggggcggccggccgggcggggggctgacccccccacctccctcccggacagggcggctggccggaagtcttaatgcagacagcattatcagtgtgttcaaaagacacgtagacacgttttgcctatagacaaatgggcaaaaggaaacccagctttctcaaatgaagcacaagtgggccttaattatgtgaaaaggtgttcaagttcatcattaaacagggaaaggaaaagttaaaatcatgctgagatatctttcatagaaatggcaaaaagcaggaagtgccacgtgtgggcagagaggaagcacaggaactctcacaaatggcaggtgtcatcgtagaccaacacaaccactttggagagcagtttgactttccccagttaaactgaacatgtgagcggccgggcgtggtggctcatgcctgtaatcccagcagtttgggaggccgaggcgggcggattgcctgagctcaggagttcaagaccagccagggcaacacggtaaaaccccgtctctactaaaatacaaaaaattagctgggcgtgatggtgtgtgcctgtaatcccagctacttgtgaggccgaggcaggagaattgcttgaaccagggagcaggaggttgcagtgagccgagatcgcaccactgcaccccagcctgggcgacagagtccccctcccccaccaaaaaaacaacaagtgagcatcctgcaacctagcaatgccattgttgaacaagttcaaagatgttcttagccttattagtcccaaaaggaagaaaaaaatggaggatttgagaatgttcttagctttattgctaagcggagaaagaaaaacaacacataccaaaaaaaaaaaaaaaaaaaaaaaaaaaaaaaaaaaacctgggtgggaaattagggccatgtggcatgaaaaggaagacccaggggaagtgtggcccatctaggggtgtggctactgcagtgatccagctgtatcactgaacttccctggcatcatagagttatattgtgccatttatggaaaaactctccccactgctcttggctttgacagtaggaatcaggttatatatggtctctcggtttgaagatatttgtcattaaaaaccagaacaagggctctgagatagggtcctttcctgacctactctggtaaagtctttatcctcaggatgcaaggataccaccctcttcctgtggaaagtgtcgaatcacatgcagagctctaagtctttcagttactttggagtgcagaaccatttcaggtaaggccaaatattttaaacattagtataggaaattagagggctctttagtctgtgtgtgcatgagaagtaaaattgcacgagaagcaatttatgtaaaatttcgcttaggaaacattgttttggcaggttagtagtatggtgtgcatttcccagaaaattcagtgccgtgagtattacctttagttaagcatcttagaaatagtagctctttatggctaagtcagaaatactaccctcaaattctatgtgaccctagttatactgttgagcctttctgtgcctctgtgccttcatccttgaatcggggataatatacttacctcctaaggttattgtaaggattaaatgcatgtagtataaataaagagctgagaacaatgcatggcgtaaagtgataggtattattatatgcttttgttggctgttgattgaaggtgttcgctgttttgggggtgtcctttaatagagtaacttggtactgtggaaatagcatgattgtgagcaaaagaatcagatggtggtggctgcagactttgctgttcccttcttgactgttggttatagccaatgcagggtaagttataaagtcaagagcagagccgttttcacaatggacattgctttgtgatgtctgtgagcttgaatgtgagaatgattattttaattctctatgtaaggactttaaagtattggctattcggtagcttgaaaactctgtaatctcaatgctttaaactgagagtggaaaatcaataaagcaaaagcatgaggccacgcagtgtagaatgagtgtcttttcaccacgtagggaaatctgtagtcctaagaaaagagggagtgagaattctggcgaaaggattgtgcctctgcacaaagtgcaggatcccagggttcagtacaggcgcgaacgctcctgtgtgttgaccacactcccacggttgctttttcagacatgctgagggggactctactgtgcgcggtgctcgggcttctgcgcgcccagcccttcccctgtccgccagcttgcaagtgtgtcttccgggacgccgcgcagtgctcggggggcgacgtggcgcgcatctccgcgctrggcctgcccaccaacctcacgcacatcctgctcttcggaatgggccgcggcgtcctgcagagccagagcttcagcggcatgaccgtcctgcagcgcctcatgatctccgacagccacatttccgccgttgccsccggcaccttcagtgacctgataaaactgaaaaccctgaggctgtcgcgcaacaaaatcacgcatcttccaggtgcgctgctggataagatggtgctcctggagcagttgtttttggaccacaatgcgctaaggggcattgaccaaaacatgtttcagaaactggttaacctgcaggagctcgctctgaaccagaatcagctcgatttccttcctgccagtctcttcacgaatctggagaacctgaagttgttggatttatcgggaaacaacctgacccacctgcccaaggggttgcttggagcacaggctaagctcgagagacttctgctccactcgaaccgccttgtgtctctggattcggggctgttgaacagcctgggcgccctgacggagctgcagttccaccgaaatcacatccgttccatcgcacccggggccttcgaccggctcccaaacctcagttctttgacgctttcgagaaaccaccttgcgtttctcccctctgcgctctttcttcattcgcacaatctgactctgttgactctgttcgagaacccgctggcagagctcccgggggtgctcttcggggagatggggggcctgcaggagctgtggctgaaccgcacccagctgcgcaccctgcccgccgccgccttccgcaacctgagccgcctgcggtacttaggggtgactctgagcccgcggctgagcgcgcttccgcagggcgccttccagggccttggcgagctccaggtgctcgccctgcactccaacggcctgaccgccctccccgacsgcttgctgcgcggcctcggcaagctgcgccaggtgtccctgcgccgcaacaggctgcgcgccctgccccgtgccctcttccgcaatctcagcagcctggagagcgtccagctcgaccacaaccagctggagaccctgcctggcgacgtgtttggggctctgccccggctgacggaggtcctgttggggcacaactcctggcgctgcgactgtggcctggggcccttcctggggtggctgcggcagcacctaggcctcgtgggcggggaagagcccccacggtgcgcaggccctggggcgcacgccggcctgccgctctgggccctgccggggggtgacgcggagtgcccgggcccccggggcccgcctccccgccccgctgcggacagctcctcggaagcccctgtccacccagccttggctcccaacagctcagaaccctgggtgtgggcccagccggtgaccacgggcaaaggtcaagatcatagtccgttctgggggttttattttctgcttttagctgttcaggccatgatcaccgtgatcatc

SEQ ID NO: 95066 - DNA, 39919 bp, Homo sapiens
  misc_feature (1)...(39919): n = A,T,C or G
tacactactcaggtgacaggtgcactaaaatctcagacttcaccactatatgcttcattcatgaaaccagaaaccacttgtaccccaaaagctaattttattttattttatttatttgtttatttatttttgagacggagtctcgcttgtctcccagtctcagctcactgcaagctccgccttccgggttcacgtcattctcctgcctcagcctcccgagtagcaggaattacaggcccccgccaccacgcccagctaattttttgtatttttagtagagacggggtttcagtgtgttagccaggatggtctcgatctcccgacctcatgatccgcccgcctaggcctcccaaagtgctgggattacaggcgtgagccactgcgcccggtcctttattttatttttttaagatatctccttattcatcctgctcttcagctgaaactgaagttctcctcaccatccactttccaacgactattgccacccacccagttctggtctttcttacttatctcctagactacagctctcatttcttgcatcccctcataccaatttatttgatacactgctgcaaaattaattgtttttttgagacagagtctcactctgtcacccaggctggagtgcagtggtgccatctccgctcattgcaacctctccttcctagattcaagcgattctcccgcctcagcctcctgagtagctgggattataggtgcacgccatcacgcttcactaatttttgtatttttagtaaagacggggtttcccatgttggccaggctggtcttgaatccctgacctcaggtgatctgcccacctcagcctcccaaagtgctgagattataggggtgacccacagcgcccggcccaaattaatctttgagaacagagtttcttcgctgtggttttcatactgaaaatctttagaagctcatactgccttttaaaatagagtggttctccctgtgtatctattttatccttcttctctaatacctctaacatttcgttaatctgcacgactcacttctcctcaaacttgtttgtttttcccgcccccgtgttcatgatcagctctcagcctgcaataccctctgcgatttgttgaaatcatacttattctttaagcatttaaaagtgatttcttgcatgagtcattgtctgattctccaaacaaattacatttttcgacagctctttagctcccaaagcactttgtaatcctctttccaaatttattatattctgcaattcataatagaacacgggctttggagtcagtggtccttcaaaatcaccgcccattggctgagaagcttgggcaagtttcttaacttctccaggcttcaatgagctcatttgtaaaatgtggatagtaatacctgaaaagattgtgtggattaaatcagctgaagtgtctggcacatgagaggtggcatgttaataacatatcttagaatatattaatttgtatgaaattcttatccattttataacaattgttagcttcatgaaaacaggctccatgtttcactcattttggtatcacctatttctacatagtacatggtaaattcacattttatggggacgattttataaatctgttgaaatattatttattcttagggcatttaaaagtttatttttcaaaatgttattacattgaactttgtaacatgcattactgttgtgaaaatgagttctatcttgtggcagattcgatgctttaaaggaatatttggtagggaaactattaactgcaaaatacgaaggcattctgccacaatgtttgggtttcatgttaaacatatcagtattataaattctacacgttaaaatatgtagtgttcatggcatttataaatcaattttaataatttatactcaacgaaatgaatctatcttatgtgttcagtatgatgagatttttttttttttgagacgagtctctgttgcccagaccagagttcagcggcatgatctcggctcactgcaacctccgcctgcaggttcaagcgattctcatccctcagcctcccgaatagctgggactacaggcgtgcaccaccacgcctggctaatttttgtatttttagtagagacggtgtttcaccatgtttgccatgctggtctcgaactcttgacttcagatgatctgcccacctcagcctcccaaagtgctggtattacaggcatgaaccactgtacccggccggtatgatgagttgcaacaaatatgtagagctgtgtaaccaccacaatcaacatggtgaacattcacactactacaaaagctttcctgtatttattcttagtctagtctccctacaggaatccccaacttcaggaaacaaccttttttgttttctgtccgtttagattagattttgcttttctagagttttatataaaagtaatcatatactatataatattttgtgtctggcttcttttgctcagcacaaagttaatgagattcattcatgtgccatgtacaatagtatgttcctttttattgctgagtaatattccattgtatgaatacactacaatttgtttattcattcacacattgatggacacatgagttattttcagtttggaattactattactaaagctgctatgaacatttggtttcaagacttagtgtagacatatgtttttatttctcttggttaaataccaagagtgaaattactggatcatatgctaagtaagtgtatattgatgtaagaaattgccaaattatattccaaagcagtattctttttagccttgtatgagaatgccaatccctgctaacattttaaaatattagccacttgagtggttgtgtggtgctatctcattgtgggtttaatttgcatttcccaaatgactaataagattcagcacttttgcatgtgctattgggcatttcttttttactttttttttttgagatggagttttgctcttgtagcccaggctggagtgcagtggtgccatctcggctcactgcaacctccgcctcccaggttcaagtgattctcctgcctcagactcccaagtagctgggattacaggggcgtgccactacgcccagctaatttttgtatttttagtagagacggagttttgccatgttgaccaaggtggtctcaaactcctgacctcaggtgatccgcgtgccttagcctcccaaaatgctgagattacaggcgtgagccacagtgcctggccggctattggccatttctatatctttgtgaagtgtgtattcaaatcttttgctcatttcaaaaaattgaattgttttattaagttgtaagctttcattatatgttccagatacaaattccttgttagagacatctgtcgtgaatattttcacttttttaatgttgtcttgaaaacacagatgtttcccattttgatgaagttcaatctgtcttttatttcctttttatgattagtgcttttttctacctccaaaatcttcaccttccccaaagtcacaaagattgttctgtattttcttagaaattatgtaattatagcttcatgattaggtctgtcattcatttcaacttaatatttatctatggtgtgaggtaagatttattttttgatatgggtatccagtcatttcatttactgaaaagattatattttccacatggaaattaccttagcttcttataaaaatcaattgaccacatacatatgggtctatccctggacttgattctgtttcactgatttttatgtctcaccttatgtgtaccacagtgtgttgaaaactagttttatagtaagtctttaaaccagatgtatatgtgctccaactttcttcttcctatgtacctctgcatgaattttatagttagcttgtcaagttaaaaaaaaatctgctgggatttggagagaattgacatttaacagtatggagtcttccaattcatgaacaggcaacagctatttatttagatctttcatttctctcagcagagatttatagttttgagcaatgatttataattttcagtgtatacgtctcacacatattttgtgaaatttatgcctatatagttcatgtttttggatgctgattaacgttgtatggtttattttaaatttcattttccagttgttccgtgtacacatgtagaaaaacaattgatttttgttatgttgatcttgtagttccaggaggttttttttttttaggattcctcgagattcctgggattttctaggaaacacattgctctcatttgcaaacagttttacttctttcttccctttattttatttttattctttttcgaaaagaagtctcgctctgtcacccaggctggagtgcaatggggcgatctcaaatcactgcaacctgtgcctcctgggttcaagcgattctcctgcctcaactcctgagtagctgggattacaggcgcccgccaccatgccccgctaatttttgtatttttagtagagacggggtttcaccatgttagtcaggctggcctcaaactcctgacctcaagtgatcygcctacctcggcctcccaaagtgctaggattacaggggtgagccaccacacccagccttcctttccttttttttttatttttttgagacagagtctcactctgtcgtccaggctggagtgcaacgggcgatctctgctcacgatttttaaaaattatttccactaaggaaactgaggcatggataggttacgttgtccaagttcacacagctaataaaatgggaggattcaggaatttgggggttgtatttcagtaggtgcaaggaatttcaaaaggtaatgtcatcagttaaggcaggaaccggccacacttctttagtgattcttcagttactttaggccatctggatgtatacgtgcaggtcacaggggatataatggcttagcttgggctcagaggcctgacacttggtaaatagacacacacacagacacacagacacacagacacacacacacacacacacacacgctccggtaaaattcacacaagtgaggccgggtgcggtggctcacgcctgtaatcccagcactttgggaagccaaggcgggtggatcacttgaggccaggagttcgggaccagcctggcaaacgtggtgaaaccgtctctactaaaaataacaaaaattagccgggcgtggtggtgcatgactgtagttccagctactcgggaggctgaggcaggagaatctcttgaatcagggaggcggaggttgcagtgagccgagatcacaacactgcactccagactgtaaaaaaaaaaaaaaataagaaatgaaaaaggaaaaaaaaaatcactcaagtgggacggtcttctcactgttggaagacctgttggactcgctagtaaacgggaaacagggcgaaataggcgtttcttccccagaagctcttaagaatgaatgaatgtttggcccagcgctgtggctcaggcttgtaatcacagaactttggaaggcagaggtgggaagattgcttgagctcacgaaattgcagtgagctatgttcacgtcactgccctccagcctaggagacagactgagaccgcatctctaaaaagaaaagaatgagtggcgggaagatcccgctccctgcctgcgtattgagaaactgccttacaaaaggccaggcagggcagagccacgccaagttcaggtgcgttccctgtgtccccactaaatgcactcgcagggtgcgcatcgccagggcgcaaggcgtctgggcgtctctctatgaagaggcgcccgcagctagcgaggcgggtgcactttcctcgggagcggaaactacagcgccgcctggaaagcgtgccggggctcgcgggtcctggatccccagtgccagggccaggcgttctggcccccgagtggcgcgcgctcccaaggggcggggcggggcgggggcgtgacgggcggtggccgggggcgtccgctcctccccctcgcggtcggtagagctggctgcgccgagccccctgcgcgctgcacatggggcgcctgacggaagcggcggcagcgggcagcggctctcgggctgcaggctgggcagggtcccctcccacgctcctgccgctgttcccacgtcccccaggtgcgcggccaccatggcgtccagcgacgaggacggcaccaacggcggcgcctcggaggccggcgaggaccgggaggctcccggcgagcggaggcgcctgggggtcttggccaccgcctggctcaccttctacgacatcgccatgaccgcggggtacgcgcgccgcggggcaccctcgggccctccccgcgccgcggtccgaaggagttgtgggttcattgggcgctagccgtcgtgtaatgggcaccgcgggtgccggcatcggccgtgggggaaggaggctgacgcgtgcctcccaaagggatgattggacgggtcgcgggtggcaggcccttggtggctggcattgccgcttcggggcactattgcgttgctacttggcccatatcattcgatcgcgaaaagtggccgcaacgagcccgaagtggacgcggtgaatgattcacaaccaagacatcgctgcaactacgtgtcgccgcacccacacgcctgttgtgttacggtaccgacctcggcaacataagttaaaccaagtaactgtccacgtacagcacctcattaccccttcggccagtcgttttaaaccagcttatatatcctccccgattcgctattttacgtatgcgcctgggtccattgacagataaacgtgtctgggtgagtaggttcaatgtatgtgatgtaccgtggttcgccgggttacagcttaatgaattgatcacgttcccgacatttgnnnnnnnnnnnnnnnnnnnncggaccgtgggggaagggagctgtcgccgcggccaccgccggggttgaatggagcgggcgggggggccgggccctgcgcgcctggcattgcctaatacggtgcacggcggggcgctggccggaggttaagtatagaaccgggcaggaatgcggtgccggcccgcgggggaggtggctgctgccccggcgccgctgccttcgctgctgttgaaggagcgcccagccctggccactcgatggtctcgggagcgcagagcttcatgctgcgatcgctgggcagagttttcgcccctgttaatttcaccgcgacttttttttttttttttttttaaagcacagcacgtcctagagcttgtcacttgggacgattttgaaataaccaccccacttatcccagcgtggagctcctgcccagcatctttatggcctcaggctccgtggctgataagctggaccttgatttttggctttgagtatgactttgcaagttaaggttacacaatgactgtcgctcttcgcagagctctcaaagtgacttttgtgtcaactgcttctcaaaacctgttgggaaaatgcttttccatttctcaattgcactgccttttaaaaaagttattttcccattatcactcgaagtattaacttatgtaaacgcgaggaaaagtttactattttctttttttctttttattatttatttatttattttgagacggagtctcgctsggtctcgcaggctggagtgcagtggcgggatctcggctcactacaagctccgcctcccgggttcatgcctttcttctgcctcagcctcccgagtagctgggactacaggcgcccgccaccacgcctggctaatttttttgtatttttagtagagacggggtttcaccatgttagccaggatggtctccatctcctgacctcatgatccgcccgcctcggcctcccaaagtgctgggattacaagcgtgagccatcccgccctgacagtattttattttattttttagacggagactcattctgtcgcccaggctggagtgcattggcgcgatctccgctcactgccaacctcagcctccggagttcaagcgattctcctgcctyggcctccggagtagctgggactacaagcgtgggccaccacgccccattaatttttgtatttttggtagagacagggtatcaccatgttggccagggtggtctcgaactcctgacctcaaatgattcccccacttcggcctcccaatgtgctgggattacaggtgtgagccatcgcaccgggcctaatattttattttaattttttaaaaatagagatggcctctcactgtgttggctaggctggtctcaaactcccggcctcaagcaatcctcccacctcaacctccaaaagtgctgggattaccacttccggcttaatattttaaactttctccagggtttatagaaaaatgtgattgacaaaaatttaataaatctttacctatggtgattgagtttctattatgtgcttagcatatgatattgaatgccaaatacagttcatacaaatgttatttactgaggacttactatgcaggggactgtgttggttattttaggtgtatttttagtcctttaaagtcctgtgaggggcacatgatattacattatatagattagaagagtgaggcacagatacttgcccaagatcacagccagcaagtgtcagtcagacatgggtttcaacccggactctctgactccactgtcctgctacttcatctttctttcctcctaaattatactcttggaaagtgagaaaactaatgtattwacaacaattcagcaatcacgaaatgatgctgcctttaaatgcattcggaactgaaagaattctctcacctctgtgatagtctggttaataaacgtttccggagccgggcgcggtggctcacgcctgtaatcccagcactttggaaggccgaggtgggcggatcacgaggtcaggagatcgagaacatcttggctaacacggcgaaaccccgtctctactaaaaatacaaaaaattagccgggcgccatggcgggcgcctatagtcccagctactccgtaggctgaggcaggagaatggcgtgaacccgggagagggagcttgcagtgagccgagatcgcgccactgcactccagcatgggcgacagagtgagactccgtctcaaaaaataaaataaaataaaataaacgtttccttttatttcctttttttttcttttttaagccaagcccttgctctgttttccaggctggagtgcagtggtgcttactacagccccaaccccgaagctcaaagcaatcctcctgcctcagcctcctgagtagctgggactacaggcgcacaccaccatcctcagctaatttgaaaatttttttgtagagtaggccgagcacggtggctcacgtctgtaatcccagcactttgggaggctgaggcgggtggatcatcgcctgaggccaggagtttgagaccagcctagccaacatggcaaaaccccgtctctattaaaaatacaaaaattagccgggcatggtggcacaggcctgtaatctcagctgcttggaaggctgaggcacgataatcgcttgaacccaggaggctgagagatcgtgccactgcactccagtctgcactctgtctcacacaaaaaaataaaacaataataataataatttctgtaaagacaggtttttgctatattgcccaggatgttctcaagtgatcctcccacaatggcttcccaaagtgctgggattacaggtgtgagccaccgtgcccagccagtgaacattttgaaatatctgccttgtgttaactgggtgtctgtcctttctcttttcagttgactctctgtcttgaaagccaactgatatttcaaaaatgaacatcaatgcatagctccagtttaaagacttcagtgactccctgccacctccaccctgatctaagggattcaggctrtctgccattcaaggctttttgcaatctgctcccgattcccctttccagtcaacttgcatttgatatctctgactcactcgtccctcaaagcaccatgtattttcacagcgctctgcttctgtgctcaggtttttcacttttgtataatgttctcctgttattcccatgacttctaatcaaatctacctctttgaagttttccgggtctcctgccttacctggtgcagaattaaatgctttctccattctgtccctctgacccttccccggcaaatcagggcttgttctaaacttgtctccttctgcctctactgagaagtttccttgtcatatttacaaaaataagggatattgaaatggaataatctctgtaactgactcttcagatgctttctagaggcggtgagatttgaagaaggaataagatttgcatacatagagagtagacatttcaggtgatataaattctggaaataggcatgatatgcaagcctgatgtattctcttgattgaactggagggtgctgttggggaatagtggtaaataaggttgaagaagttgtagtgttgaaatcgggacaagaacttacacgttttatagggtggacagcagaagactagttgaggctctttttgttcatttaacttatttctctgttaacagaactttggcgtgtttattaatttttttgtaataattttcaaaacaagtggggaacagtggtatgcacctgtaatcccagctactcaggagactgaggcaggaggattgcttgagtccagtagtttaagaccagcctgggcagcaaagcgagaccccatctcaaaaacaaaacacacacacacacacacacacacacacacacacacacacacacacacaccccaaattgcaaagcaacggaatagtatttaagaaatattataaaattttacataaatgtaaaatacagcttgttattttatcagcctatcacacactttcattttctttttatctttcatatgaatatttgacctcttccaagtttttttgtttttgtttttgtttttttttttttgagacggagtcttgctctatcacccagctggagtgcagtggggagatctcggctcactgcaagttccgcctcccggattctcgccattctcctgcctcagcctcctgagtagctgggactactggcgcccgccaccacgcccggctaattttttttggatttttagtagatacgggatttcaccgtgttggccaggttggtcttgatctcctgacatcgtgatccgcccgcctcgccctcccaaagtgctgggattacaggcatgagccaccgcgcccggccccctcttccaagtttttactcaaaacttcattctcaaggaggccttacctggccatcttaatttgaatagtgaaacacatactccttatctcccttgcctgtttatttttctccatcccactttctttcatatgattgtacaatayattttacttattcgcaatgcttattgtctgtcatctccattagagtgtaaactccaagaagtactcaataaatatttgaatgaatgaatgagtgaatgtattacagcattgctgttataatatctgctgtattgtatatttttccattttcacttaatagtctgtcaggttttcatctgtttttcataattatactttttgacagttacatttgagtgtatagaattaattatacaataatggattaaatcatgcgcctaacgacattttgcttttatttgtttctgttcaattcgtggcttagtgtaataaattcctggaagaagaattacacctttaaaggatgtaaggattttttagggtttttgtttttttttttttttttgagatggagtttagctttgttgcctaggctggcgtcaaactcctgggctcaagtgacttcctgcattagcctcatgagtagctgggattacaggtgagtgctaccatgcctggcagatgtaaggatttttttttttttcaagacagagtctcgctctgtcacccaggctggagtgcagtggtgcgatctcagctcactgcaagctccgcctcccgggttcatgccattctcctgcctcagcctcccgagtagctgggactacaggcaccccccaccacgcctggctaatttttttgtatttttagtagagacggggtttcaccgtgttagccaggatggtctygatctcctaacctcgtgatctgcctgcctcggcctcccaaagtgctgggattataggcgtgagccaccacacctggccagatgtaaggatttttatggcacttgctcataatagggaagtgagcatttctctccctccctctctctttctttctgacaaatacttttgtgcccgtatatataaatgcattgtccttcaaatactttaggccctgtccttgaagcagggtaacctggggcattaatatataaacaacaattgcaataaaataatgagataagtgctaagcagatgtgtcagaggacagacaggtagggagaattagagaaagttttctgtgagagatcacagcatttaaactgagcggtgaaggacttaagtaggcataagtggggaaacagcatgagttagaggacagagatctgaaattgcaagacatctgttgaggcatcaagaagagggcttgggccgggcgcggtggctcatgcctgtaatcccagcacttgaggctgaagcaggcggatcacgaggtcaggagatcgagaccatcctggctaacacagtgaaaccctgtctctactaaaaatacaaaaaattagctgggtgtggtggcgtgcacctgtagtcccagctactcgggagactgaggcaggagaatctcttgaacccgggaggcagaggttgcagtgatccgagaccatgccactgcactccagcctgggcaacagagcgagactgtctcaaaaaaaaaaaaaaaaaaaaagaagaggacctgaagtgtagagtgggaaatgaaggcggacaggtagcttggggcattgcactgggcctcagatgctttgctaacatgtttggattttagtctgtacacaatacacaaaggtgttgtttaaaggttgtgtctcattcctttgtagctgggtaacctcagataagctacttaacctctctgactcttagttttctcatctgtaaagttggaacagcacaactacttagctagattataaaggaataaagagataatggatatgaagttcttagcaggatgcctgatgcacagtggatgtttacaaatgttcatttttattcctagtggtttatttaaaattgtactttttttttttttttgagacagagtctggctctggagtgcagtagcaccagctcagctcactgctcagcctcccaggctcaagtgatcctcccacctcagcctcccgagtagctgggactacagtcacgtgccaccacacctggctaatttttaaattttttgtagaaacaaggtcttgccatgttgcccaggctggtcttgaactcctgggcccaagcaatccacccaccttggcctcccaaaatcctgggattacaggtgtgagccactgcgcctggcctaaaattgcacttcttgcagaaagagaaagtaagatattttcacagtatacttagtatgatttaatagaacaagaaacccaaggttcatttcccagaatgttaagtaagagccatatcttttattgctgcgtagaatctattttgttgctgaggacagatccgcaaatggacctaccacaaattgttcatccatccatttgttgatggacatttgggctctcttcagtttttgctattacaaatcaagctataagcatgcatgtacatgtctatgtacgaacatatgcttttgttttgcttgggtaaatacctaggagtggaggggctgggtcataggatagttaagtgtttaatttctttcgttcttttttttttttttttttgagatggagtctcactgtgccacctacgctggagtgcagtggtgcatcctcggctcactgcaacctctgcctgcggattcaaacgattctcctgcctcagcttcctgtgtggctgggactccaggcgtgcaccaccatgcctggctaattttttttctatttttagtagagacggggtttcmccaggttggccagcctggtctcaaactcctgacctcaaatgatccaaccgccttggcctcccaaagcgtaatttcttatgaaaccgccaaactggtttccaaagtggttatacccttttatcttccctctcgcaatgaatgggacttcccattggtgcacatccttgccaacccttggtgtggtcagtcattgtaattttagacattccgagaagtacattctgttatctcattgggattttgattttgttttccctagtagctaacgatactgagtatcttttcatgtgcttcacttgccaatcatatatcttcttgggtatctgttcaaatcttttgcccatttttagctgggcacggtggctcacacttgtaatcccagcactttaggagggcgaggcgagtggatcatgaggtcaggagatcgagaccattctggctaacacggtgaaaccccatttctattaaaaatacaacaaattagccgggcgtggtggcgggcgcctatagtctcagctactacggaggctgaggcaggagaatggtatgaacccggaggtggagcttgcagtgagccgagatcgcgccactgcacttcagcctgggtgacagagcaagactctgtctcaaaaaaaaaaaaaaaaaaaccttttgcacattttttttctttaatgggctgtttgatttcctattatagggttttgaaagttctttatacaatctggacacaagtgctttaccagatatgtgatttgcaaatattttcttccagtttgggcttgattttttattctcttaacagtgcctttcaaagagcaggtgtcttaatcttagtgaaattcagtttctcaagcgtttgttttttcttttatgaatctttcagcttgactcgttattggcatgagtgctggtgtacaatcagttgaagcactcacatattggctgctaaacaaaagtataacttttatctagaaaaggcagtttagaggtgtcaatgaacaatatatgaaagtatgggccagacgtggcggctcacgtctgtaaccccagtactttgggaggctgaggcaggcagatcgcttgaggtcaggagttcgagaccagcctggccaacatgttgaaaccccatctctactaaaaatacaaaaattagctgggtatggtggcaggtacctgtaatcccagccacttgggaggctaaggcacgagaatcactggaacctgggaggttgaggttgcagtgagctgaaatcacaccagactgggtgacagagcaagactccatttcaaaaaaaaaggagacaaagtgtggagtatatgaaagttgaagactatcttcggtccaagcctccaaatggctaaaggaggtatacaaaggaaatagcaagctagaatattgtttttcaatgattgttgaaataatggatctagccaatgatcatcagtaactgctagcatcacaaaagagagagtctggccaggcgcagtggctcacaccggtaatcccattactttgggagactgaggcaggcagatggcttgagcccaggagttcaagattagcctgggcaacatagggagaccccatctctactaaaaaaaaccccacaacagcaagaacaataatgagccaggtatggtggtacacccctgtggtcccagctactcgagaggctgaggtgggaagattgctgaagcctgggaacccaaggctgccatgagccatgggcacaccactcactccagcctgcgggacagagcgagaatctgtctaaaaaaaaaaatcctaattgcagaaattccagttgcttttgaaatattttctgtttgttttattatagttactaaaccgatagatgaaggaagttcaaaactagttcaatataggacccttaaagagactttctttgactgtcaccctttctgatggagggcttaggaagtgaaccctgattcaattggctcctggccttacttaggaaaaacagacaagaggttagaatagatgtttcgatgggtcctttcaaatccctgagcctgtcaatttcttttatttcccacagtttagtgagtggcacgatcatgatactatgctaggtggtacaatactgccacctatggagcaacagtagaacttgttataatgttaacgatgcatggatttttatacaatgctgtttaaaaatgtagaaaacttgccatccaaatgactcctttgattggtaggttaataactgcctctcaaacttatcttttgtggacatctgatttgggttcacctaaaaaagacaagtgtatggaaaatgtgaatgaaaatatcttaataaactttttgttttcttagtagaagaaatatggggactttgaattgaagataatgaaatcataatactttagttgtggaaggtacctaaagcatgattccgatgagtgctgtaggatcagtccagttcagtgttggcgctcacatgagatggatccatcagttgtagccacagtgaagctggggtagagtggaaaggggtcaggactagggagtctagagactgcagaggttctattacagactcagtcatgaacwtactctaagactcagggtaagtaactgaatgttctggaagatgattatctcatctaaaagagtggccttcaaactttttggatagcatgctactatcaattaaaatatttgagcatagactctccatataactttaaaaatatatttataatgtaaatatgaattgctatcattaactggtatctcagggcacagtatatacttagagccagaccgacacagcatagtggcttaagagcatatactccragcttagtggtggctgtgtgaccctctctgcctatttcctcagtagtgaaataggataatagaagaccctcgcctcatagggttattgtgaggatttgaggttaatatgttatgaattgaaaacagtgtctaagacatagaaagcactctgacaatacacttattattgtcattgttattatcatgaatatgtctgcatttcaaaggtccttgtggtcctttcagatatttacttgacttcttgccaatctgataaacaagtcattgcttttaccttattatgttctaagaatagaagtgtcattctgccatcttattattctcttgagaatgcattttcatcagattcagttagtagattctttgcaggaatcttttcaagccatttgtccactgtatgagtgttstttgattaaaaaagttaaaactgcatgataattttatatttcataaatctacttactagactctttggagactatctaaaagactagggtagctcctcatttccctgggtgagttattagagcttttaaaaagttacagatgaggtaagttgcttaaacttaaacgtgcttttggaattgcaggggaaactggaaaaaaataaacttcttattggtgactttaggaagagtaagaagtagtatgagaaagctggtctccacaactctagcttatatttaaagcacgattattattcacagaacataagctatatttatatgcaaacgtaagtttaaaagcgagggcatatagtatttttttctttcttttttctttctctctctcttgttttttttgagacagggtctttgttgcacagcctggactgcagtggcacaaacatagcttactgcaaccagcgcctctgtgctcaagtgatcctcccacctcagccttccaagtagctggaaccacaggcatgtgccgccatgcctctaaaattttttttttttgtagagacgggatcttgccatgttgcccaggctgtttttttcttttcttttcttttttttgagacagagtctcactctgtcacccaggctggagtgcagtggcaccatctcagctcactgcaacctccgcctcatgggttcaaacaattctcctgcctcagcctcccgagtagctggcactataggtgcccaccggcacacccggctaagttttgtatttttaatagagatggggttttgctatgttggccaggctggtctcaaactccggacctcaggtgatccacccacctcaaccttccaaggtgttgggattacaggggtgagccactatgcctggcctcttcttttgtttttttttttttaaacaacctttttgaaagcaggcccatggctgatcttctatctgtggctcagcaattgttgttgttgttgtttttagtgaaaattaagtaaatattaattgatgactttttttttttttttcccgagatggagtcttgctctgtcacccaggctggaatgcagtggcgtgatcttggctcactgcaacctccacttcccaggttggagcaattctcctgcctcagcctccggagtagctgggactacaggtgtgcgccaccatgcttggctaattttcgtatttttagtagagacagggtttcaccatgttggccagactggtctcaaacctctggcctcaggtgatccacctgcctcggcctcccaaagtgctgggattgcaggtgtgagccactgcacccggcccatcttaactttttaaagtgtaagttcagtggcattaagtacattcacatttttgtgtaaccattacttccttctgtctccataacttttcatcttgcaaaactgaaactctgcacccagtgaacgctaactcctcattgccccatctgtccccagcccctagccaccactatcctactttctgtctctatgaatttgactaccctgtgtatacctcatataaattaaatcatacaggctgggcatggtggctcactccatgtaatcccagcactttgggaggctgaggtggatggatcacttgagttcaggagtttgagaccagcctgggcaacatggcgaaaacccatatctacaaaaaatacaaaaattagctggatatgatggcgcacacctgtagacccagctatggggaaggctgagatgggaggatcgcttgagccctggacgtcaaggcagcagtgaggcaagactgcgccactgcccttcagccagggtgacagagcgagaccctgtctcaatcaatcagccaataattgttctttgttaaagatgacagcaacacataatgcaaaaaaagaaattttttaaagaaaaaaatgatcatacagtattagtccttttgtgcctagcttatttcacatagcataaggtcttcaaggtttatccgtgttgcatgatatgtcagaatttctttttctttttaaggctaataytctattgtctgtatagaccacatttcttttttttttttttttttttgagacggacagctctgtcgcccaggctagagtgcagtggcgtgatcttgcctcactgcaagctccgcctcccaggttcacaccattctcctgcctcagcctcctgagtagctgggactcaggcgcccgccaccacacccggctaattttttgtatttttagtagagacggggtttcaccgtgttagccaggatggtctcgatctcctgacctcgtgatccgcccgtcttggcctcccaaagtgcggggattacaggcatgagccaccgtgccaggcctgtatagaccacatttcaagtatccattcactcacttatggacacctgggttgcttttaccttttcactattttgaataacgctgctgtaaacacaaatgtataaatcagtggtattaagttcgaaagaactttatgaaatactttttttttttaggtggttggttctagctattgccatggtacgtttttatatggaaaaaggaacacacagaggtttatataaaagtattcagaagacacttaaatttttccagacatttgccttgcttgaggtaagttttccatcatgctgtttttctattgctgtaatatttatgtgaacattttttgttgtgcaaaatcaatatgattttgctgattacataccacctatggatttgctgaatrccaatgttgacagtggtttatttaatgttttctattattgacgtaatgatttttttctatttgcttacagatagttcactgtttaattggtgagtttttgcttcaattttatasttttattataaattgcctttagggcaatagttcacttgtttttctttttaaggaattgtacctacttctgtgattgtgactggggtccaagtgagttcaagaatctttatggtgtggctcattactcacagtataaaaccagtaagtgacacaaacatgttgtctacttgagcctgcaggaaagctttccattcataggaatctaaaatattaacatttgtatatttcaggaggtggaagtgttggacaaaaaggagttgggtttgagttttagatgttgtgcattgacttagtgccttagcagaatgactttgatacacaaacaaacccaaatattggcatcttagatccgtaatatattctcctttgatattttccagtttttgaaatcagtattcaggttctgtcaaataacctgcagaaaatgttcttttctatagaagtttcttttcaatccaagttgtcctctttgattatgtaatcgaagttgtcagtatacaatttattatttctggccagccgcagtggcccacacctgtaatcccagcactttgggaggccaaggygggtggatcacctgaggtcaggagtttgagaccagcctggccaacatggtgaaaccctgttcctactaaaaatacaaaaattaaccaggcgtgggggcgagcacctggaatcccagctactcaggaggccgaggcagaagaatcgcttgaacccgagaggcaaaggttgcattgagctgagattgtgccactgcactccagcctgggcgacagagcgagactccgtctgaaaaaaaaaaaaattatatcttatttagcattgagtattacagcaacagacataaaaagtaaatgcagttctgtagatctgaacaaacggaaaagactgaaagttagaaggggtcaaaggataaaaattttagttaggaggaattaagttcaagagatctattatgcaacgtagtgactatagttaatagcaatgtattgtatatttgaaaattgctaagagaatagtgatcttaccacaaataaataagtacataaggtaatacataggttcgttagcttgatttagccatttcacaatgcgtacatatttcagaacatcatgttgtacaccataaatatatgcaatttaaattttcaattaaaaataattgtcaaaaaattgctaaggagctttaggaaaaataaacaatttttattgaggcatgacaggagacagacctaattattgaatctaattaatgattcaaacctttcaggcgagatagacaccatgctgctatgtcaagatattgggcattttaaacccatgacagggccgggcgaggtggcacaagcctgtaatcccagcactttgggaggccaaggtgggtgaaccacctgagggtcaggagttcgcgaccagcctggctaacgtggtgaaacctcatctctaccaaaaatacaaaaatcagccagatgtggtggcgggcgcctgccatcccagctacacgggaggctgaggcaggagaattgcttgaacctgggaggtggagggtgcagtgagctgagatcgcaccactgcactccagtttgggtgacagagtgaggctccatctcaaaaaaaaaaaaaaattaaacccatgacaggaacatttcctatgtcaacccttctgaccttcttgacagcctttagagcctcctgtctactcgaggacagatctctggcctcctttccatttctcasatgcctttcttagatgcttggggactgacacctgacctcttctctgttcctcttagcttcactggccccctgtctgcatggggacagctcactgacctcctgctctttatactttatccctcttgactagtatctttcactcaacttgcatgatttacctgcaccctaaacagcgactgccatgcagatagtgcagatagcagtgagcacatgcaatgggagaggcaaactattaattaactttgcctactagtttaaaagcaggaggacagcattaacagactagaagacagactcttccaggcagtgagggaatataatagctgagttaggaccaccatgagtctgaagaatgaagaagaaagacaacattaactagacattaactagagagatggaggtaaagggaagcttgagagtcgcgagttccaaaaataaaacaggacccgtctgccccgtttatcctccagaggatctctgccttaatattcctatttattttttgctgacgatagtttcccactggtacctattcagcactcgttaattaattcaaccaatattattgaatgcgttctctacacctggtgctgtgcaaatttctggatttacagaaatgaataaggtgggcgggtggggtggctcacgcctataatcccagcactttgggaggctgaggcaggtggatcacttgaggtcaggagttcgagaccagcctggccaacatggtgaaaccctgtctctactaaaaattcaaaaattagccaggtgtggtggtgcgcacctgtagtcccagctactcgggaggctgaggcagaagaatcacttgaacccaagaggcagaggttgcagtgagctgagatcgcatcactgcactccagcctgggtgacagagcgagattctgtctcaaaaaaaaaaaaaaagaacaaggcaatcccagctgtccagtgtactggctgttgggaagtggggtacacttaacgttaaatcacgcacaatgctaatcatgcacctcatctgtgcccggcagtgtgctgggatatggctgttgataaaacaaacatggttctcgcctggtggagcctatacttgggagagaagctaaacaaatatttaatcatatacgtgttaagtgctttgaagcaagagctcrgtatgcgttgcagtatacctaaggacttagtctgacgtagggagtgcaagaaggcttcccttaaggagggatacagatgttgaatgctgacatgtacaagagttagccagacaactcttagtacagattggcaaatgccacaacacagatatgaacaaagtacagtagaagaagggtgctgggctgggcatggtggctcatgcctgtaatcctagcactttgggaggctgaggcaagcagattacatgagatcaggaattcgagaccagcctggccaacacggtgaaaccccgtctctactaaaaatacaaaaattagcagggcatgtaatcccagctactccggaggctgaggcatgagactcatttgaacctaggacgtggaggttgcagtgagccgagatcatgccactgcactccagcccgggtgacacagcaagactccgtctcacataaataaataaataagctaaataaataaataaataaaggtggtgagcaaataactgctcagggtgagaggagagggttggagtcagttttctagagggcgagatgttttagctgaatcttgaaagataggaaaagattttttatggaataagagagtaacattccagtgagagtgaatagcatgtgttaaattgcacaagttcagagcatattctggaaataacaacayctagtgtcaccagagagagaagtaggtagaagggttgagtaattgtagatgaagttggagagatttccgagcaaggattgcaaagaaccttgaatatggtgcccaggtattagggctcatccttttattctgttaagaagtgtgggaccagtgaaacttttaaatcacaggacttagctgattccaatttgttttttatgtatttgcttctttgacttctttttaaaagacaacttgcattcatgaggacaataaagggaggaaagactatttaggaaacagttacagtagtcaagatgagagatgataaacccctgaattaaaatagtagtaaaagggccaaagatgagtgagcaattcaagcgttggtcctacagtagaacaggtgtgattcaatgattactagaagtaggagggtcagattttggtttcagcaaggtaacattgtcctctgatgatagcgttatttcctgaagtgaaggacgagggaagaaaaacgagtctatgctcaactattcctgtgcataagatacgtttaagttccacgtttataattaattatgttaatggtgactgcattaagttttctayattgcatttgcctaaccctaacattccattataaataaaaggcaataaataagtaaagtaagtaccttcactgaaaagtaagttctaggttgaatgacactgggtttctctgtaattctgcagatccagaatgaagagagtgtggtgctttttctggtcgcgtggactgtgacagagatcactcgctattccttctacacattcagccttcttgaccacttgccatacttcattaaatgggccaggtggcgatatcttgcagtttagtttctccttgtcctgtgcatgcttattttgtgtgctaacgccagagaattaaaattcgtgtttcagccccacgatgccagaatgctgttataggaggtataactggtataactaataattatacaagttatgatttgtattctaaaagcttaatgatgagagaggaatcgtattaataaatattttgagtgaaatcaatgtgagacaaattgtggtatccttaacctcagaattagtcattcatttttttttggaaagcacaatatacatttttggaattagcttacataagcagtaccaaaaatatgttttttttttgtctgtgatgtaaattattttaatagtcaatctagcagccacaatttataccatttacacaatgcgattggtttttttctttgctttaagttgcagagacatttttaaaagtcacacttacttaaaattgtattatttggaatgtggataaaatttatatttgaagggctccaaatatatcctaaagcaacagtttttaaaggaaaagatatctgttcttcttgaagtttgaattctttgagcaattgacgttttagaaagttattataaaagcaaaactgctctttggagaacaagtcacaaatcagtatagacttgttcattttattctttgtattgtactttatggtagcaataacaatgacaaatggtgtgtgcctactgcatgcctgagatgtaggtatgaacaaaacaaattctctgtcttatgatgaagacaaaacataaactaataatatgtgatatgtcaggtggtgataaatgctgggattataggtgtgagccaccatgcctggtcaattactattttttaatcccaagtattatacatgttcaaatataataaatgagaatatataaaccaaaaagaaggaaaaccacttttaaattacttataatctctctaaccaaggataaccactgttaattgtgttttatgggtttttttctctttttttttttttttttttttgagacagggtctcattctgtcacccaggctggaggatagtggcacgatctcggctcacttcaatatccaccacctgggctcaagcgattctcctgcctcagcmtcccaagtagctgggagtacaggtgcaggccaccacacctggctaatttttgtattttttgtagagatggggttttaccatgttgcccaggctggtctcgaacacctgagctcaagtgatccacccacctcggcctccctaagtgctaggattacaggtgtgagccactgcgcctggccatgttatatactctttgtgactttttaatattctctagctcttttttagacacttgcggcttaccactttgtatatgatgagatactttgaaattataatttgagcttaagtgtcttgtctgtcataagaaggttgtactaccatttatatggatttggttggttttaatcttactgtacatgaaaatgtgtttacctttagtgactgagctttttaaaggttggcagttttgaatgtagctggactctaatcctagaacacatcaatatcatttcgcatgacaatgttctggacctctggcacctttgaaaatactaacttaccatatagtctcttttcatgtgctgaatttacaaaatttgtctgaagaggatagcagaatgtacattgcatattttcctgaggtcggcacattagacttgatggctttgtgtgtctgtcttttggaatgcatttgcatgtcttgagtgtctggaaaagataaaaactctgccatcgtatgtttaaatttgctgtttagaaagtgtttatccattgcaggctgggcgtggtggctcatgcctgtaatcccaacactttgggaggccaaggtgggcggatcacttgaggtcaggagttccagatcagcctggccaacatggtgaaaccccatctctactaaaaaattaaaaaattagccacatgtgcctgtaatcccagctacttgggaggccgaggcaggagaattgcttgaactaggaggtggaggttgcagtgatctgagatcacaccactgcactccagcttggtgacacagcgtgactctgtctcaaaagaagaaagtgtttatccattgccttaatgttaaacaagttatacagtctttcagctttgaaatcatatgttacataatactttgtcagttgatcataatcataaataattatgtttcatgtcaaaaagatcttaaaaatcccagccatctaaatatgtttcccaactccattaagtaaggtaaaataatatttgtatttatgttcagatgttgaagctgtcattctcgaataaaactacactttagaaatggcttcttagttataagtagtttggcctattgttacagtttgaatatactttgattctatttatgtgtcataagtgttcttggaaaagtcctcagaataggtaattgtatatattaagttaggtttttcatattgatttaaaatgcactcccttcaaaaaaattttagatagtaattgggaaccttcaaagaagcattgtatctttttttttaatgtggtctatccatagttaaatctcccatactgccctcagaacttagagaagtagtaacatgcaatctttttgaagtgcaagtaaagtcaaattatataatttgttcccatttcattagaaattttcattgcccttaagactttcaactagcttattgtaggagtgttaattttttcttctattgaagaacaatcctgccaaaaaaaaaaaaaatcttttgaaaaccacataaagtaaaaattgcaacttaatcagtttgggtattttactgagacaggtatataaaatgtccagttatgggatttaataaattgaggaatagggaaagattgatttaaatgatacacaaataactacccaaaactggtaagaaagcagggagtttctccaaggccaagaagggattaacaggtacagtgaaggaatcattcttctttcttgaatagctcatctattttggcaaataattctgcccttctccccatctcttatcttcgcatatccttgacatacaggaataatgcaatttttaatttgtctccaagcttcttcaatactgacaactttgacttttctttatagatatttcctaatgccaacaaaatgattaaataaaatacagattaatttgatttctttttccatcaaaatgttgaccttttgttttaaattaaaaacatttttctttttttaaattaaatttattttttttgagacagggtctcgctgtgtcacccaggctggagtacagtggtgcggtcttggctcactgcccccttgacctcctaggctcaagcaatcctcctgccttagcctcccaagtagctggggcgacaggcatgcaccactgtggtctgctcattaaatttttttttgtgagacggggtcttactatatcgcccagagtggtcttgcactctggcctcttaagttttctgtggtaactgttatatagtgactgagtcagagaaaaatgatttttttttttaatgaagaaatatgatcatcttggatcctttaggcccctcttattggagaccagccagtagaacacagagtgtttcctaattggaagcatacaggatgcctggcctactgtgtgttccagaccttgccacagaccaaatgaacacatgatgactttggatttagagtagaactttcttaactctactttaaacaagctcactcttcttttaatgtgggaattcaggaactaacttgtcaatttattttgttacggtagcagttttagacaatataatatactcattagtagctactcatgcttcaggtggtattatcagttttctgcaataattggttttcattagtaaccacaaagactttttcaaatgcctcttaaaaataactaccttggtaatttcaaggtttagatataaaatttaggataatcactggtctttttaaacgcagtgtttgatcaataaattactagctgccgcggacaaaagcagtcatttgtgattttatgcaccaaagaagttaccattacaatactttttttaaagctacataggccgggcatggtggctcatgtctgtaatcccagcactttgggaggctgaggcgggtggatcacctgaaggcaggagttcaagaccagcctgaccaacatggtgaaaccctgtctctactaaaaatacaaaaattaaccgggcgtggtggcgggcgcctgtagtcccagctacccaggaggctgaggcaggagaattgcttgaacccgggaggtggaggttgcagtgacccaagattgtgccactgcactccagcctaggcgacagagtaagactccatctcaaaaaaaaacaaaaaacaaaaaaaaaaamcaccaaaaattagctgggtatggtggcacacacctgtaatcccagctacttgggaggctgaggcaggagaattacttgaacccaggaggtggaggttgcagtgagccaagaytgtgccgctgcactccagcctggtgacaagagcgaactccatctcaaaacaaaaacaagaaaaactacatatacattttttaatacataaaagtattttggtactctaaaataagttgatactattttattaaaaagacattgcctattatggaaactggtattaggaaaaaaaggatgataatcaataagcaaatgattaaagtagaactattaaccttanrtaaggttattgtaaatatgtaaagaaaagagaattttgaagtttaaatttagtagtagcaatagacctgcaatgtaaagtctaataattattgtagaaaaataattctctgaggtttttctttctccagatataatttttttatcatcttatatcctgttggagttgctggtgaacttcttacaatatacgctgccttgccryatgtgaagaaaacaggaatgttttcaataagacttcctaacaaatacaatgtctcttttgactactattattttcttcttataaccatggcatcatatataccttgtaagtatatacttattagtastttgatttgacatatgatgtggaaatttttgaaaggatataataatatgcaaggggaaataattagaaataattgcttacaaatacattaaaacttyggtttaactccatatttactgataatttgggaaaagtgaagggagatagaggcagaagacagttcattagctatgagaataaaggcaggtaaattaacgcatggattattgctttctcaaaatcatttaaacatcagcttagtatgatttttttaaagaaagataaaaacaaatcatgtttaaagcattagtgcactttttacaagcatttagaattatatgtctgagtataaacactgtgtccaagaaaatttcagatcatttctatctattcattaagcatatacttggaaaaatcatctaggagtagttttgagtcttatttgtgttgctctatgtacttgcaaataataaagcctcttttcttaaaggattttgaataagtcagcctcttcactaatttctcatcatctttcagcagttgaagtgaattggtraggctttactccatttcagtgctgctaatagtgaggcagggctccgtggctcatgcctataatcccagcactttgggaggccgaggcaggtggatcacctgaggtcaggagttcgagaccaggctggccaacatggcaaaaccctgtctctactaaaatacagaaattaactgggcatggtggcgcatgcctgyaatctcagctactcaggaggctgaggcaggagaatcgtttgaacctgagaggcagaagttgcagtgaactgacatgatgccattgcattccagcctgggcaataagagtgagactctgtctcaaaaaaaaaaaaggcgtgggggctaatagtgatatatttttaagtcaaatattgatagctctaaaatctacatcgacatgatacaaattatttcatctaaaggagatgcgcataaaacttggccagccccttgaggtctccaacttttttttgttgttttttttgagacagagtcttgcgcttttgcccaggctggagtgcagtggcgccatctcagctcactccaatcgctgcctctcaggttcatgggattacaagcgcctgccacagtgcccacctaatttttgtatttttagtagagacgaggtttcaccatattggccaggctggtctcaaactcctgacctcaagggatccacccaccttggtctcccaaagtgctgggattacaggcatgagcccctgcccccggcagatgtctccaacttgtatctttcccaaagtcaaaattgacttagtggtgaaagatatgttttccccttgtcttctaccacttcagcctgattctgtatctgattttctaccccagccagttcgggagagctaaggaggggatgcctactctattggttcacatccckctcttttcccaatggcaggttaatggtagcattacttgaacagaaccagagcttgcttcggtgtctgtctgacagttacaggttcaaacagtgggttctcttcctcctcatggcttttgaggcatctccatggaaatggagagcctgaagcacctttttcagttgtcctgggagatgtagactctggcctgtaccagtagcagcttcccagttcaccatgctgccagctactgagtcccactggccagagaatcactcagcccagaacatgttttccactgcatttttttttaattccctcctccccctgcattcttaatgttagtaataaatcaattaattttacttattaaatcctttgctaattaaaagtactttttgagtacttagtattcaaaagtagtagtattatttctcatttacattaagatgaaagaggttaagtgagttgcttaaaaatcactagcttgtggcctggtgtggtggctcacacctgtaatcgcagcactttgggaggccaaggtgggaggattgcttgaggtcaggagttcaagaccagcctgaccaccatggtgaaaccccgtctctactaaaaatacaaaaattagccagacatggtagtgggcacctgtagtcccagctactcaggaggctgatgcaggaaartcactgaaaccggggaggcagaggttgcagtgagccaagattacaccactgcactccagcctgagtgacagagtgagactccatctcaaaaaaaaaaaaaaaaaaaaaaaaaaatyagtagctggtgagttaaggcrgggtttgaactcaagcccataccttctgttcagctactcggaattttatggaagtatttacaataattggtcagtgagtttaagtaattatgacctgagtaaatttagccccctaggtatatataatgtgatggtaacctttcttaagttaggaagaacctaaatrgaaagactttttatccaaagttgcctaagcaggatattcaaagcttgttttgtgataaggttcattggtttsattattctgatcatcatattcagaaatatttttacactggcattgtttatagctgatattaatttgtttatccaccaacatttatactatgaaacactggtttgaaacactggttcaaattggttcaaaatattcttcaaatttgactggacagatgacaatttgtccaactgacctaataacrtatgtatttatgtgttattatataatggattaaatacccttacacccagccaggrggagcttctgctttaggctctgttaagaggaccttgctgtagctcttctgtggtcactccacacagcaccccactgccttctagatcacattctagaaacctgagaccatggaatttgctacccasagggcaatgagcatgcatctgggccctaaccaggcttcttcgttgatccatggtcctgagggttaaccatgtatcagtatacgcacccctgagaaaacaggatagccagggggcagctgtttgtgaggggtatggatgaagcttagatgtatgcacccgggtatcctcacacatgtgcaggagaccccttgcagtacaggatacagccagtagaatggagaagaggaggctgggtggggccagttttccctgtgctggaatgttctggcgcagcattccaaagagttcagaattctaaactcaaacatggtcttccaggtcattatgaaggtatttttatcaaggtatttaagtttgttaaaaacaagcaaaaataggccgggcgcagtggctcatgcctgtaatcccagcactttgggaggccgaggcaggcggatcacttgaggccaggagttcaagaccaggctgaccaacctggtgaaatcccatctctactaaaaacagaaaaattagtcaggtgtggtggtgatgcatgcctgtaatctcagctactcgggagactgaggcaggagaactgcttgaacctgggaggcagaggttgcagtgagctgagatcatgctactgcactctagctggggcaatagagtgagactctgtctcaggaaaaaaaataaataagcaaaagtaaaaacaaaacctcaacagttacagcattagaatatttaggcatgtggtatgtgggcttccatttgcactcttatagtcttgagctctgtaratatccagrgaacagcagtggtatgggatgtatttactctctaacattgccacatttaacaggtttcaagtataaataattttaaagcaatagcttgtttttctttgttttctttttcaatgaagtgtttccacaactctattttcatatgttacgtcaaagaagaaaggtgcttcatggagaggtgattgtagaaaaggatgattaaatgatctctgcaaacaaggtgctttttccagaataaccaagattacctgagtccaagttttaataacaagaataaacaactttgtgaaatatcatggattgtatggtttcttaaaatataacttgagacacgtggtatttgccagtatttgtgttcctcttgtgccagatctattttttacaagaactgtgcaaatatcagtaacttttgggtaggtattgattattaggaaaataattaggtgtattatctgggggaaaaaaaaacttttgctaagttttttttgaaacatgctcaaagctttttaaatcaatatttagaaattagtttaacgatttactattatacctgctagtgatatttatgtgatatttataaatgaaaataaatgcaaaattataacaacttgttaataatgtattggtatttttgaacccacaatctattttttcaggaataaggcagcattatgactaataacagtgtttggaagcgtggatataatttgctaaagtaagacttttgatgtagataaagtagcagcataaaaacacacaaatattcaagtagatgtcacagttggaaaatattctttggaaatatttctaggcagctgaaattacttatactgctaaggaaatctgctttttatttaaattagccacttaaggacaaggttttcaactgtgaaggttttaaggggttaggaagagcataagtatttgccccactattaaaaaaaaaacatgacatctgactataatgttgtattcaggctgggagtggtagctcatgcctgtaatcccagcactttggaagactgaggcaggaggatcgtttgagcccagaagttcaaggccagtctgggcaacatagcaagaccccatccctaaaaaaattacaaacaaaaaaaattaaccaggcatggtgacacatgcctgtagttccagctgcttgggaggctgaggtgggaggatcacttgagcccaggaattcaaggttacaatgagctatgatggtaccactgtacttaagcctgggtgacagagcaagaccctgtctctgaaaaatagtgatgatgatgatcatgatgataacgatgatgaggaagatgatcatgctgtactcagaactttggttgagaaagtcttctctatactgtagaattatcttgtaacaattgttatgataatccctttgtggtacttaggtaactaaacattttggggtatgatctttggacagactcctttcattctgaattccattgaatagcaaaaggtcttgtaataaagttcctgtccttgtgtttaataaaaaaaatacaccagacctactttcataactgccttaatttgtaaataggtcctttaaaaaatttccctcctttattcaagtatgttgatttactaacccagtttttgagagaatattaaatatgtgactttcaaagaaaaggaactttttttccccactatagatatctaggtgtaattttggctttaaatgttctgtattgtttccatttataatcaacacgtaacattacacttctaaaaattacttgattttgtgttaccacctcctttacagattattttcacacagagatttgtagttcagaacatttttgcaaacctttactttaaataacttggtttttcaaaggtgctatttcttttattacattacgttgtaatgtttcctctgcagctgactgtttcgttgagcaatatggattaggttactagttctcaaaagatctaacattcattctgctcttactctatgtgatcagtttcatcttggatttttatatggaagaaattgtcaggtagtctttacctttggttacatagtatgagaatttcacatatttattttattagatgcctatcttgcaaaaatattttaaatcatatttctaaaatgtgcattaattcaactagtactgccttcaagtggctgtaatactttttcttcttatgttgtggaatatcttgaagtaggaattgtgattaactttaataaaaaatgcattaaactatttggtgaccctttaacatatgcaaagtacacctaaactttaaatttcgtttatcttctatattcgaccaattctaaacgttatttgtttggaaaatgaagtgctaaacagtagtttgattttaaaaggaaaaaatatttgaaattcctttacacttgtgttgacagaaaagagtcaaactctgtaaaatatttgaagagatttattctgagccaaatataagtgaccatggcccatgacacagcccttaggaggtcctgagaacatgtgtctaaggtggtcggggttcaggttggttttatacatttttagggaggcatgagacatcagtcagatacatttaagaaatacattggtttggtccagaaaggcaggacaattttgggggtgggggttccagcttataggtagattttaaaatgttctggttgacaattggttgagtttatccaaaaacctgggctcaacagaaaggaatgtctgggttgcgataagaggttgtggagactcaggagttcgagaccagcctggccaacatggtgaygtagcaggacaagctgcagacaaaacccctcagacaccgagttaaagaaggaagggctttattcagccaggagcttcagcaagactcacgtctccaaaaaccgagctccccgaatgagcaattcctgtcccttttaagggcttacaactcttaagcgggtctgcctgagagggttgtgatggattgagcaagcagggggtatgtgactgggggctgcatgccccagtagtcagaatggaacagaacaggacagggattttcacaatgcttttctatacaatgtctggaatctctagataacatagctggttaggtaaggggtcgatctttaaccaggcccagggtatgttgccaggctgtctgcctgtggatttcatttctgccttttagttttacttctttctttggaggcagaaattgggcataagacaatatgaggggtggtctcctcccttagtgaaaccccatctctactaaaaatgcaaaaattatccgggtgtgctggcacacccctgtcatcccaactgttcgggaggctgaggtgggagaattgcttgaacccaggagacggaagttgcagtgagctgagaacgtgccactgcactccagcctgggcgagagtgagagcccatctcagaaaaaaaaaaaaaaaaaagaagttgtggagaccaaatttctatcatgcacatgaagccaccaggcagcaggcttcagagagaatagttgtaaaatgtttcagacttaaagtctgtgctgattttaatgctggagatgtataatcaggcatgtctgactcccacttcctgtcatggcctgaaccagtctctcaggttacattttaaaagagccctagctgaggaggaaatccgttcagatgattgggtgttgcggggggacggggcttttatttttggtttacaccgttttctgtgactgcatcttcttttgaccttccccataaatgaccataactttcaatagccaagtcagggtttgtatcagacagaactttggaatacagtcctgcagacttgggcatttgaaacacagatcaagaaattttgatgctagcaactttcaattatatttggtgacaattccttcatattctgattgttttttgattttcatagctttatagcttgctatattatacaatatgcaagttttaaaaaatatttttcaaaatgttaattcgacatgaatatagcaacatccttgatagttttagctttttaaaaaagcatgccagaaatgtaagaaagtcattttcaccaagagtttttgttgcttgacatctatagattttcagaagcattattttctcatctttatatttttaagcatctaattattatgctgcaatgtcatagtttctagtgatatattgcaaatgatctaaactttgcaataatcccttttcctcttcacaaatatgtatctcatgcccactgtgtgtcaggccctgttgtagggaattaacatcttcctcttatcttacctctctctcccctacacagtaaacctttagcaaaattactgggttagattggttagtaaatcatattgcaaaataattatctgtgctttaacaaatacagtgtgttggtaatctgatgggatgggttctttgttactcatatgtgtataagcatattagggcaccactaaatcgacagaattctggactaaaactacttcataacaaaatcagttatagttgatgagaccaatacaataaatcattaagagatccttgaaggaaaaaaaataactgtaaaaggcaacatttaaaatatttttcatatgcatatgggacgtatagaggtatttacctttcacatacatttagatttggattacacatataattgatagaataaaaaataagcaatgcagttttgtaatttctagtatgaaggcattgaatagaacttaaaattcaatttgtttatagttttagtctaaatttacaaaatatttaaatagacataggtctctcctttagatatgaagcttaaagatatattctaaacattttagattttttttgtgttcctgttatagcttttaaaatattttggtcattttttattttgaaataatttcaaagttacaggaaatttgttaagaatagaaggcaaagcacctctaaacccttcacttgaattccccacttgttcatattttgccccgtttgctatagttttctctctctctgttcataatatgtcctgaaccatttgagaataagttgaaacattaacccctaatttcttcagtgcatatttcctaagaacaaggacatcgtgctaccttgccactgtaccataacctaaatcaggaaatcaacactgatactgttattagaagaacttcagccaaattaaatttaaaggaggttaattgagcaatcaacgattcgtgaatcgggcagcccccagaatcagcagattcagacagactccagggatgccctgtggtcagaacaaatttatagacaaaaaaagggaagtgacatacagaaatcggcagtgaggtacagaaatagctggactggttacatattggcatttgtcttacttgaacacagtctgaacacttagcagtctgtgagtggttgaagtacgtcctctgggattggccaagactcagctgttgttacaggtgcatactcctagttaggttatcaatcttgtccgcctattgagctaggttacagttcgtccacaaggactcaaatatagaagtacagagtgcttctcaggccatatttagtttaagaatccaatacctttatctaattggtagaccttattccagtctcattgacatgtatgtatgcatgcacatgtatattctgggtcaagatccaatccagggtcagcaattacatttagttatcatctcttttagtctagagtggttccttagtttttcttcacctttcgtgacttggacattttccacagtacaggatcgttgttttatagacagtccctccatttgagtttgtttggtccctccgtttgagttcatttgatgtttcctaatgattagatttaattatgtacctttgggcaggaatattaaattgttccattttctggtgatgttaactttcatgtctcagggtctttgtttcttaatgttttggttgcacatgggtattttaataatagaaggagttctaatttataggagtttgtgaaacaagacattgggatttatttatttatttatttatttatttatttatttatttatttatttatttatggagacagagtttcgctcttgctgcccaggctggagtgcaatagcatgatctcagctcactgcaacctctgcctcccgggttgaagtgattctcctgcctcagcctcccaagtagctgggattacaggcatacgcctccatgcccggctaatttttgtatttttagtagagacggggtttcaccatgttggccaggctggtctcgaactcctgacctcaagtgatctacccacttcggcctcccaaagtgctaggattacaggcatgagccaccacaccctgcctggattttaaaaaccagattaatatggctgtgatctcatacatgaagactgatgtctttttaagtgcataaaaagcactaaattatttatgcatatgcaatttccaggcatattatkaactcaaccttcacatcgacgtttgcgcctctagattataccctagaaaattctgggtattaattaatatactttcattttgctcaaaagttcttaactgcagcattctgttccgcattact

SEQ ID NO: 95067 - DNA, 138280 bp, Homo sapiens
agaatgatgccagggattggagaattacttatgccactaattgctgcctatagactcacaagtctgagtgttggtcagtaacctttcaatgattgcattttcatgcacaagtacaactgcacacagatccaggcaataagaagtaccatacaaatagtagcagcacctctgtcctgtgaagcttgtaaaagcgtaagagtcaacacagaccagaactacagatcaaacataatgcaggctgaagatacactcattgcaatgggtttcctgataactgttgagttcttagaaatgtttataaagtcattgtcatcccataatatttacaggaaaaattaaataaaattatttataacctatgatctgataggataggttgcatgaggacatagaaaacatacacagagggataacagaagcactacacacagaaggggaagctattttctccctagtgagattgaagaggccaatgtctagtatactgctgctgtagttggcggcatattttaagcacttagtaaatatttgttgaataaataaatgacctgcaagatgctgagtgaacccaaatatactctctgcatggggctaatctgcaatgagtcaagatgcttgcctaagaatatcatctataaagaggcagagggaccaatggcagtgcttgatgacaccaaggaatctaaaaaaatactggaagtaatcattcattttctattataaaaagttcaggattagtctgaaacattccctcatagtttgataaaaatgtcatgccttctgaagtcatatataactgttttgccactatgattagctattattcatatacaaatcatccaacccacctgacaattactttctgtaaaatagggtaataacatttacttcacgaatttgttgaaataataacataatacatggaaaatcacctaacatgaaagatagttgtttttcaagtactattttatttcctactttccttattttcaacatgtgttctacaccaggaactaaagtagacaatacggtaagtggtgtattagtctgctcaggctgctataacaaattaccatagtaagggggcgggggcttaaactacaaacatttatttctcacatttctagcagctagctgtctgagatcagggtgccagcatggttgggttcaggtgaaggccttcttcggggttgcagactgctgacttctcattgtatcctcacaaggcaagaatgcaagagagctctctggccagctttcataaggatactaaaccagttcatgatggctccaccctcaagatctaattacctcctaaaggccctgtctccaaatatcttagtatcagggatttaattttaacatgtaaattttggagagcacaaacattcaatccataaaaagtagtaaataaaattgacacaaaccatttcctcacagagctcacagtctagtgggtcagacagcaatcaaccaaactattatgacagacactcttggaagtgctgtgaaagaagaatacgaggaggaatagatttttgaatgacttggtttaactagtgttgtgggaggaaggtggcatcagaagaggcttccttgaaggagtaatcttaggcttgcaatgcataagtctaatagaagttcctttggtaggagtcaggaagaaaaatggagactttcccagaggctagcacagtttttaaaaggtctaaacttgatagggcctagagttcttgactacactaagtctagagagcttgaacagtaccacatgagccagaacatgaaaaaccttttaacaccgtgttaggaattatatgcttccagctgtatgtaacagaaagatttttaaaaaatgaaagtggcttaatttgtaaacataattattgcttacacaataagaaacccagattattagtctgtttccacactgctataaagaaatgcccaagactagggagctttgttrttatgtaacagagatattacaaaggaacacatatgcaagtataattttattatttttcagaataacttatgcttttattctttcccttttgcagctatataaattacctttttgaatggaacccccgacccaggccttgggggttcytgcattaggatcattcatggatattcattaagcccattttttttcacattgtcagctgagaaatggccaagacttttgaattattagttaggatttttcaagtgccttagcactgttgtctgttctagcatgtgattgagttctaaaacacagttattagaaaactcacaaaggcattttttaattagaaaaaaaggaattatgagatagatttaatctcacagcatcatacttgtttattcttgatgggagctcagtaacagactgttgctttgtaaagttatcagtgcatttaaaaaaatttccaagcaaagggaataaattgggttatagaaactggcaaaaataaacctgattatcattatgtcagtcctgggcaattgaagaaatggaggtcaggcatggtggctcacgtctgtaatactaaacttttgggaggttgaggagggaggattgcttgagcccaggagttcgagatcagcctgggcaacacagtaagcccctatctctacaaaaaaaatttaaaaagtagccaggcatggtggtgcgtgcctgtaatcccagctgttcaggaggctaaggtgggaggattgctggagcccaggaggttgaggctgcagtaagctgtgattgcaccactgcactccagcctgggcaacagagcaaaacttcgattcaggagaaaggaaagaaagggaagggaggggaagggaagggaagggaagggaagggggaaggaaggaaggaagggaaggaaagaaaggaaggaaggaagaaatggggcacaatcaacacatttctaagccatcattaaaactggttactagaataattaaaatagaaattgaaacaaggtggcaaaagaagcacaaagccaaaactgcaactccaagggaaaattaaatatgggatcatataataatcattggaagagcctaccacaccaagaaaacacctatttctgtaagttatttttctgcagacaggccaccgtggactcttgcaatgcaaattgtatcccataattatgagcgtatgttatattcatgattcatgaaaatcacatgggaaggaaaaaatcattcctctcctttcaaaataagatgcttaaggcttccttttctcttatagagatggccttgttaattgaattctgatactcaagtctaccaaccaacacttccctgacttacagtacaaaaggcactgagagttttggtttctataataattctttccatgcttccatgacttaccaaaatcttgctccttattggcacattagttttccttgatgtattaacatatttaatacaactacagtcaagttttctgagatccctctataatacatttttaatgttatttttttctcttgataatctttaaaaagttaaatctattttgggttctgtgaatgaatatcttataactaagtactgacatttgattttcatgcttttatctgtgttgtgtttgcaactgttttggaaacaatcagtattactttaattgttatgagctaatgagaaaaggacaaagtcaggcttaaaacaaaaagatgtgttgtaggcaagataaagccagaatacatcatggtggttacactcatgaagagttcatagttatttgaatagagaaaaagagtctagaaaaatgaattgccctgtggaatatagcagtatagacgtgctgaatttcaaagaatcagtcctgtaagagtagccaacactatattccataatcattttgcaaacaacagtttccgtaaaaaatcccactattatattaagattgttaatttgaagtttttatatttaatttgtaaatttgtttggttgtatatgtatataatattatcttaggtttatacattaaataccattacataatgaaagtaatttattcaccactgggatcagataatttactcctttacacattgtcaatattttattcaagattgaggtttcacatcaaacctcacactcattgctggagttatgccttaaacagagtacttgtgacaacagtgttactgttgaatggctgtgataattagaaagttcaatttgtattgtttgttgaaattacatttcctgtaagttccaaccattggtggcagttattcttaggaacaaatcaaaggtgctctttttgtttaaactttaagttataggaggataactatcatgtttttctttattctacccaaatccttttcttgcctccataaatatttttgagaacttattttgtgtaaaacattctgcattagccattttttttccttttccaggttaaacagctccacacctttcaccctttcttggaaatattttttttctaatccctcaacattctaattacgccattttgcacatactttagtgatgtccgtcttaaaatgcagcacttagaaataaagacataggctgggcgaggtggctcacgcctgtaatcccagcactttgggaggccgaggagggcggatcacgaggtcaggaaatcgagaccatcctggctaacacggtgaaaccctgactctactaaaaaatacaaaaaattagccgcgcgtgacggcgggcacctgaagtcccagctacttggggggctgaggcaggagaatggcatgaacctgggaggtgaagcttgcagtgagccgagatcgcgccactgcactccagcctgggcaacagagagacgggcactccagcctgggcaacagagcgactctgtctcaaaaaaaaaaaaaaaaaaaaaaaaagaaatgacatagcagtttgggaggccagggcaggcagatcactggaggttaggagtttgagacccgactggccaacatggtgaaaccccatctctattaaaaatacaaaaattagcctgactgggtggcgggtgcctgtaatcccagctacttgggaggctgatgcaggagaatcgcttgaacccaggagatggaggttgcagtgagccgagatggtgccagcctgggcgacaatagcaaaactccatctcaaaaaaaaaaaaaaaaaaagaaataaaggcatagaaaatggagactttcattcaatatcatcattaataaccagtaagtaggaagtattaaactcagcaatgcattagacagctagcggggcaagacacggaagtaaatggcacactggtcttaccttccaagagttttcaatctaattggaagggagtattacaattttagattataataattataaaaacaaacattataggagctcagagggtttagagatctgtgttctgtagttattacaggaggcctctagattctaacttgggttagggcttgaaactacattgaatttgaatattcccagtttaaacatgcacgcaagtattatgtccaaagtagcatgaatactgacaacaccaaacatgaaacccagatttatttattctctatttagtcctttccctactctttagagcagaaagagaaaatccttgcttgagatagcaaattagtgctacactttttgggaaggccactggaatttaaacctggcaaaattccaatttttgtgcttgtaacctgtttagccggcagccagtgaaagctgttataattctttttgaattgaattttctttcgtattgttttaggtacagctcaagctcaaatgatagcgtctctttttctttaaaaaaaaaaaaaagtgctgtcaagacaggaaaactggaatgtaaccagattagccgtttcccgtatacatttgcccttaagcaagatggtgggcgccttgtgcacatgcgcggaagggttgtttcggcggggagttccgccgcgtcggaactcgctccgggcgtggattggcggcttgctggcgggggcggaaccggaagttccgtgytgtggggctcagctggttcatttatgttgtttttcctgtacctaagttcccgctgtaggtggtacctttgcagacggtgcgatgggggaagcagagaagtttcactacatctatagttgtgacctggatatcaacgtycagcttaagatgtaagagaacactcgggacagggagtgggattgctggggcgtagggacgtgggggcaggggcctgttgggagtgagaggcagaaagtacgtgactcgtctcaaggcccagattgggggcggctgtgagggctgtagccagggaggcgcgagagagtggatcgtggagaggggctcttttggaaaaggatttaatacgtggtctccgtgagaagcacagcagtaggaatagcccttaagttccgctgtattttacagtctttaaagtttttgctgttcagccttttgagagtttattactatttcattgtaaattaagaaatcaagtctcgtcgtaagtaagaggacgatctttattttggaacggggcttgtagggtggaatgaaggcttcagaaattatggagaggtagacacaggcagatgcgatagttgagaataagatgagcacatggtgtattagcacgggaggtgatagaggcctagagtgaatctttgggtagtacagtgtttagtcagggaagttgggagtaagtcgaagatgagggttccagtttcaaaggtaccaagaagataggagaaaagagtctttgcaggaaaacgttggggcaccacggctgaagtaaaggtcaagggcgtgatatcttgagatgaggataatagaactggtataatgacgagggatgcacaagacagagttggaaattatgtcccttttaaggtggtcatgtaggagtgttgtcaaagctatcacaaattattgaccatagcatcatccataattaataracatttcttgtgtatgttcaattaatattcaacaaatatgtgtcggtcaaaggcctgcagtaagtgatagataaattttctcagttgtctgatgtacctttgaatgatcatttcattttattttcagaagtcccttattcgctgacaaatactttactttttagtttgtggtggtggtggtaaaagtaatatgtcaacaaccaccttgtacctttgtatgatactttatacactcatttaaggtattttccatagcatacaccactagtagtttatacaggatcaatattgataaagggctttccttcagcttgatgctcagtatttcttggatatatgaatgcattttttgaaatgtttgaacattaaaaataaagaaaaagccaaaaaaaccggtccctttttttttttttttttttttggagacagggtctcactctgtctcctttccctttgggatgacgttctgcttcttttgcttcaactctcatgcattgttcaggatcatttcagacatctatctggggtactaagtcccttccccatgccagcctaagtactcttgagactctgatttatcttactgtaatgggaagaatattggctttggcctccctgccctagtgtttattctcagctctgttacttacgttgtgactgtggataaggagtttagtttataagtctctgtttcctcatttataaaatgagaatatggtgaaaattatgtaagaaagaaaatataaaatgcctggcacagtatctgatgtaatcttgatgtctaaaaaatgttcctccctctgtgatagtatcctgtgcatatctatttatgacttataccactgttttaaagaaatgatcagacaatgcatatgcatagtaaaagaaaaaaatggaaagagtagaataaaaacatgcagttaaaagtaaatttttttccccagaagcaatgacttaatattttattgtaatactgtattgcttatcttttctttcttctgggcttctttgtccactatggtaaatgtttcctgaaagaatagatgaatatgtggtcaacttgaaatgaagaaaatgaaaccaaggcctagaaagctggtgacttccagagggtagatcaagggtcaatggcagcgtttaaaattcagaagtataaaatagagaaatgtgttgatgaagatgggactgatattaggtatgttaggattttaagaaacccttatcatatataaaaatgacattaatttcatatacaggaaaatgttgtttaggtagcataccttaacacaaaggtaaactttttagtacttatgcatatatgtacatgcttaaagcatatatgtacatgcttagtacttatgtatatatgtacatgcttaaaaaattcatgtctgaaacrttgttggtcttgtgctttcagaggaagcttggaagggaagagagaacaaaagagttataaagctgtcctggaagacccaatgttgaagttctcaggactatatcaagagacatgctctgatctttatgttacttgtcaagtttttgcagaagggaagccttyggccttgccagtgagaacatcctacaaagcatttagtacaagatggaagtaagtttttttgtggcatatggtatgttrcagactgttcttacctttctttatggatgctgcaagtataatttagtaggattatagaggaatttcttaatacctataggcattgatcaaatcatttgaagtagaaacatactcagataaagtattatgcatgtcagtattataactgcaattgaaatagaaatggatttatgtttgtagttagcatattgacattttgataagcacttgactgatttacatgaccaaaaacaaaaacacgtctgtggcattttaaaattctttaccatcctgtgctcttgaatgcataratacttctggatagtctgaaatattgtccaacctgatgtttggagctcagatttttagagatagatctattgccatcggttcagataaaatttttattattattttacatatgaaactaatttatttagattcatagtttattcagcatggcacattagcaagaccttgtcaagatgcagggtaaatataatgaacatgaagttcctgtttttttcagaagagtattgtggatccttaatctgacttcttgacacttcttatttgatagactatgtagtgcagttctgatgtttgatcagcgagtgttattcagcactctggtaggctcagtgtaggatacacaggctgtatgcttttaaggaaggagtgttcatggaagacaggatgtgaccacatggacagccagactgtgccatagagggttcaaccctgtgtgtcccaggtgtcacccagtgtagctggaaagggttttcaaacagcagaagcctgaactctggtgatctggccatatcgaaaccaagtattttaatggtgtaatttcttcagtagtctttgtggagagatatctgtctgtctgtctgtctatctagcctatctatctgtatatatatatgtgtgtatatagatatagatatatatgtatatagatatgtgtgtatgtgtatgtagatatacacacacacataaaaaatatatatatatacttaatactttttattctggaaaattttaaacctacaaaaatagaataatacagtgaacgcctaagtttctgttacatacctactgttaactcatggccaatcttgtattctcaccattttgtaacaaacctcaaacgttataacaccttaactgtaagtatttctgtatatctgtttttaaagcataactacagtatcatcatcatcacacctaaaacaatggagcagaattccttaattgtatcagagattcttaaactggaatcaggaagtcttcaaacccctgaaggtgtatgcagaattttgtgttttgtgtactttttcagggacagagctcaaagctttaattagatttttgaggtcacctattactctcagaagagttaaaacaaatttaggtctagaaggccaaaaacattttggtaaggaaaaatgtatagtggcttctgttgcatgacttgacaaaaaaggaaattacaacaaaagcaaattctcaattacaagattaaaggttttctcctcctcctcccatttgccaactcttctctgcattagtttttatattatatgtttgcaagaatataaaaacttccatgtttgatctctaaaagttgaatttttaacgtttgtagtttttaaattgtgaaagtactggaaagtacgctaaaattatttaaaacgactttgaaattaaaatgtctaagctatgtagacaatagatttagaaaaacaccttattttggataaaataccacgagaataggctttttaaaaaaatactgtacaggtggatcacttgaggtcaggagttcaagaccagcctggcccacatggtgaaaccccctattaaaaatacaaaaattgcctggacatggtggcaggtacctgtaatcccagctacttgggaggctaaggcaggagaatcgccggaacccaggaggcagaggttgcagtgagctgagattgagccattgcactccagcctgggcaacagaacgagactccatctcaaaaaaaaagaatagtctttaggagactaagagaaaacatttgcacattttatacatcctgctctttagtattyraaagttgaatttattggtagttcatcaaaacaaaarttgccatcctaaagtgagtggaggtaaaaaccttaaatagtccttakttataagtatttgcttaaaagagatattctataaaccttggaaagaagaaattagatcataaagggatctcttgctatccaaatttttgcattccttagttcagatagtattttagggccagtatgagattctaaattatttaaatctgtttgatttctgactttctgatagtgagttgtgagagttctaataatgaggaactcatccgaaatttattcaagtctatcatatcatgtcctattctgtcctacactaagagatcccatgagggacacttgtacttcctttaattacacttaaggtaaattctcatttttaggtgtatgtactgcaaatttctaagtttttttcttatgtgaatattattctttagggaagtagtttacatttttaagaacacttatatttcacattgtctcataaaggttttgaaaatggctttagagagacatataatacaatctaattcaaaaattacaaagttaggattcagaagtattttaatcagattcgagtgctagcacaatggtatgcggtgatggcggtacctggtggggattggagcatccagatttaggctttgcagtctggtgatgttttgattgttgccaagtgaatgtaatcttaaggttaatgagggttagcggatggggtagggatgattcgtgaagaggaggagaacgaagtggtgtccaaaatatatacctttttggtgtctgactagatttttctataacttctagaatatctagagcagttttcaaactttttgactgaaggatcattttttcttttttctttttttttttgagatggcgtctcgctctgtcgccaggctggagtgcagtggcatgatcttggctcactgcagtcttcaccctctgggttcaagcaatctcctgcctcagcctcccaagtagctgggactacaggcgcgcaccaccatgcccggctgatttttgtatttttagtagagacacggtttcaccatgttggcgaagctcatcttgaactcctgacctcaagtgatctgcctgcctcggcctcccaaagtaggatcatttttttcaaaagaactcttctgcagaagcctmgtatataaaacatattaagtgcagttgctttgattgaaagtggtgttgcctggtattggatagcaaaaggtttgagacaaatgattagttggtcattggtgttgtctggtagtcattaaaggacagaatacagaataataaattccacaatattatccaaaaagaaatttggataatatccaaaacattattttggatgttatcgcttattgttgtcttcaactttagccagtgttaattaacttctgtggtttattcattggcaaaagttggcactgcttagtgtttttctttctagcctgccctaccatgtggctagtaattagataattttatttagttgtttgagcctatttgtagtagatactggctttcttaagcatgtgattaaaaaagtatttcatagaagaaaaggatttaataactcctttttcttgaaattgatagccatctctaatttatatggcgtatataaatgatttgttgtttaagtttttggaaattttgttaaatgttttagcaatacagatgtatttaacatagactaggatatgtcccttagataataactttgaatgaacagaataattttgagtaaacagaaatagaattctatgtgtctgctaggtattagtttggcatattgttggcacagtattcttttggaatttaaaagccagctcctcttgaagagggttgaaattatcaaatgaatacagtgtgaaatttaaaagtataagaaaatttacataaatatatagagggtttaaaaaaaaagagctgtggtgtcattaactatattattattaacaaacattcctcagtgaaagaatatatacagatgtgctttgaaagcataaagcactaatagcttaatgttatcagtattaatgaaatcatttgaggaacagaaaattctcgcataagaagtcacatatctgtctggagcagtctggtaacttcatgtgataaaggtagtagattttctactttgagtttttgttttgattgttttttttcctgatttattctcagaagtgcttttgagtatgagtaattttgattattttatcttcataatgtaaattgggttttgaagagtggttaaagaaaatcatggtttgtttaaaaagttctaacaggttgaaatgttttcccaggtttttttcgccattatattatctggtgtcttggtgttttctgagttttattaaaaaatttaacagagctgtttttcatgagctctattaaaacaattatgtttttatttaaaatggaaagttgcctttagcaaaattgaggtgactgccatattattttttagagtctaacaacatttttggaaccttttcctctggccaaaactttttgtgtggtttgttaatttaaaagaaagatatatatatatgtatttctgatttatgttaacttcatttccatagctggaatgaatggctgaaactaccagtaaaataccctgacctgcccaggaatgcccaagtggccctcaccatatgggatgtgtatggtcccggaaaagcagtgcctgtaggaggaacaacggtttcgctctttggaaaatacgggtaagcattctgttggtctcatctgtaggagtgtagcagctttctgacccttttctttttcggaatgagggaaggctttaatagtttatgctcagtctccagtgtaaaccagttaggtacatatgatttgatcattccttacactgattttaacatatatttcctacaggatatacagatagattaggaaatacmatttatattgctcttctgttggtgatttaatgtgatttctagtagaaaatagaagtcattgggaaatagaaccttgcttttagggaaaagtgactatgacatataactgctttgttacagggtttatctgctttttttataatattgacagaaaggatgaaaaacaggattaaaaagcattcattagctaatgatggtaatgattgtgatagaaaagataattcagtttttgaaacatttgcaaatactagatgttaattgttaaaaaaaaaatcccatagtcccaaaggatattttctctatatcgtttttctcctgggacagaggactcagtctgtctttagagaatttgtgacattctgttattattctgcatttactaataggaatttttcactaaagaacttggtccttcatcaagtatttacttagttcatataggaaagacagataaatattttaactttctttccctttaccgattttaagactaatgagtttgtgccctagtaacttgcaaaggtggtgatcgatggcttttgtgcattttgttttttatgtgttttagtccattgctgtctttactctttataatgctcaaaaaatctcatttttggtcagtaggagacccttcaagtagaccccgtgtccttttggcagtacactactagtgattggtagcttctttgctttctggtagacaagtttttccaggctcatttggtaattttctgctccagacctggaatctctgaaagaagttctggttcctttcagtgtgaaatgctatagatctgtctggatattacaaatgtcttaatttttgtctactttaaagttaaaaaatgttatttaatttttacatcattaagtatgaggaggattgtattttggagtgtttattgactatttgtgtttatgtttccatgaactgctttttgatgtactttgtcctttttagaaattgagatataattcacatatcataaaattctttgcttttttttttttttgagttgtcgttttcttattgatatataaggagtctttgtagatgaatggaattagccctttgtgggttatgttacaaatactgcttttctggtttggtttgttcttttgaattagtatgtatttgtttgctcttcatggattttaaattattatcttgaatctatcagtttttagtttttgggctgtgaatttaatgttttaggaagttcccatttaagattctttaaaatggtttcttctgttgtgcttttattcctttatattaaaatctttgatttatctaaaattacttttgtgaaagagtggtatagtgagaatagctttttagagaaaaccaaaacaaatggtttgaatatttgtcccaacactgcttattaaataagtcatcttatccagctattttaaaatagcatccttatatactcaattcatcatgtgttgaagtctaagagaggcattatagtgtatagtgctatagtggttaggaaagcaagttgtagattatctggcttcaaatcttggcttctttgcttagtatctgtgtatccttgggcagattatttaatcttatgcctcaatgtcttcatatgttaaatgaaagaacaatagtatccacctcattgagtagtttatgattgttacattactaaatacatttaatgggcctgataaatattatatcatatatttatgtattgaataaatattataatgaccttaataaatactaggtatccttcctgggctattctgtcagttaggatagtattataaaatgtttaagtattaggtaaggataattcttattagtctttcttttaaaatatttccaggtttgttttggcagatacattttaatattttctcaattaaaaaactcaatgttattttgttagaaaatcttactgaattatatatgttaattaaagagagaattgatgcctttataatattaaattttcctatccaggaaaagagtgtgtcagaaaggcttctaaactcatgaatgaaatctagatgtaatcccatttggaatagcttggttgcttacaaatacctaggtattttagtttaatgtggctattaaagagatatttgttattaaaattcatacaggaaaaataacttagatgtagtctgaaacattgtaactttcagttttaaaatatactttttgataaaatagcatgttacagcagaatggacatattgctaaatcagtattgtttcttttacagagtgtttaccccttattttttgttactagggaggggcttgtttgcaacagagaagaaaaagaaaaatgtacagctcttcttagtggctaaatatttttgagaaataaccagacattcctcttggtttttcctcccagattcatcacaagtggtttaccttctggaatatcaacaggaggttccctcataaaaacacctgcgttagtactcatgcattttaggggactttaggatctagtttcagaggattttctgactaggatgtagttgtgggagggacaattgaaatttccacagatgcagtgaaatgaactgcgtacatctaaacaaactctcagattgatttttggtactgtttagtttggcttctggcacgtttttttaaaaagtactacatcaaatcagtaataatcaacctgtgtttaagaaccatcctggaagcctatgagaaaagcatcttcctgggttctcactaactcagtgtgtctgtggtggggcccaagaatcagcattttaaacaagcatcctgagtgagtctgtgaaagggagcctatgaaccacattttgagaagcactgaactgacctttgtgatagtttattaatatgacttacacgtgcattcatgcgttcctcttctttactccttctcttggtgcccactttatttgtaattctgtgtatatcccagtgaaaggaaaattcctttacctcccatccaaaccaagctggcagcgtgcctaaagacaaatcagtagcacttgttctactttaaaaagtcattaaaccccaaggatttctataaagggagcagtagcaataagtgagtggttacttaaatttgttttctgccattaactaaaataagactttgaatcttggaaagtcatctgttttctcttaactctaactggaaaataggtcatcctacactccttcatgtcccgaacacatcagatgcccgatataaatgaaacctgttagagagaagcactgattgcgtgaaattatctcacttagagcttgatttctccaacttgagtcatttacttatcacttttagaattccattcatatctctttgctaagtatattgttcctttttttttttttttttttttttgagatggattctctgtcgccctgctgtggggtgatctgagctcactgcaacctccgcctcctgggttcaagcgattctcctgcctcagcctcctgagtagccgggattacaggcccatgccaccgtgcccagctaatttttgtatttttagtataggcggggtttcaccgtgttggccaggctggtcttgagctcctgacctcagctgatccgcctgcctcgccctcccaaagtgttgggattacaggtatgagccactatgcctggcctattgttctttacttgatatctttatttaccccaacttactttttttaaacttccacttattttaaaagaaaagcttgatatccctgttatacatggaaaacaagtattatttaacattagtgggtaatagcaagactaaatataatgacaaaaactatgctattaaattttagaaattgaagcaaaagaatccctagtgaatacaaatgatatgaaattcatttgatttgcaaaatatgcatacaatatctgcaaaaaagtcctttaattagaatggttctgttttccatagtcagatatacacggaatattcagctcactctcagattaaggtgaagatcaggctttacatcattttcatttttaatcagttcaactcctatatagttgtagggcagttatccaaacataactaacataacgtaagattttaatataggtctaagatattttgagggggtggagtgcaaaaagactaaatcaccaactcctgttccccctgtactggcgcttgtactgaccttcacctcagaagaaggaattctaagaaaccctatgaaattaaaacaactttttttttttcctctctgtcctgtagccttgccatgtgggtgagctgcctcgcattggagaaaagccaggcatttcctagtcctaagcagctacaggtcttcttgtgcagctttggattgtgaaagatgatgttcaggatgttcctggtgctacagcagagtgcagacatctccttatgctgttggctcacagctacttccttgcatggtgctgccatccagggagtcagggcaatatgagtattctgggtggtctcagcaagaagcgcgtgcagattttcttccacctgtcctcaaaaaccatgccatgtgccactaccattctcataacttagggaaacgctgcctttaaccatagttttctcagatgtttcttatgcagtgaaataacaccaaccatccctcgccttttcccctaaagggttctgatgtgtacttagtagctgttaaaagtgatcctcaagacatctagtattgtagtattgtagtattggtaatcttgtgactatcagctcttgctgtttgctaatatctgttttgtttacatgagtcagtatgaggcagaacttcttggagaatagtctaattaataattgaaatactgatttgttagggataaggctagaataatttgtcgtccttaatttggaagtctagcatatgaaatttcaaagtagctaaagaatggattgattgttaggttgacctggcaaagaaccacatgcaagctgtagatttctcttgcagttgttttttctaaatgtgaatcctggaagtcaaggcagttggtgctgtagtggcttggcactgcaagctggaatatcaacagcagctgttgctggggcctctgctggagtcagaaggagatcctgctgtgctgtttcttctctctcgcctgtttggcttaatttcccaagtggacacgatgctctgagcatcttctgccttgccacctggaggctgtgtaactctgcaaagttccattagtgtcaaaagaaagtaatatgttcacttgctcatttgagtcacttggcatcacccataccctccacgtcccctatccttaaatctcttctctagatccatcccaaggcacctaaatcatttagtaaactgacttcttgccaaatgtgcttatttttgatttagttcagccagccaaagtattcactgggggatgggaaggtagagagaaggaagggaagccttctgctatttctgaaggtacatttaaggatatttatttaaagtgatattwtcatctcactgtmcgtagttccttagagactgctctaagcaggcctgcttaatgttgaatctatatctcagttgaaagagaaagaaaattaactttataagagacatgtatatatgtggtttttgtactgtaattttcttttgatgtttaacatgataaataaatattgagaattttgatttatcacagctagtcaatgcattttgtatgggtccataaggtaagcttttgcaaatacagttactagaattatctgttttattgccaactttagagaccttttaacagatatggtctttgatcttattgtgctcatgagtttgtagctgtcttttatagttcccaatctaaatgtttatggcatcattacttatacacattatataatgttgagtgaaaatctttattaccttaggaaaatctatgaagaaagtttttattagccagaacattataataatgatttgaaaaaatttatgtaaaccgttagcagttaaggagacaatttttttttgttgttttttttttaagttttgaaacagggtctcactttctcacccaggctggagtacagtggtgcaaacatggctcactatagcctggtcttcccaggcttaagcaatcctcctgcctcagccccctaaaaactacaggcatatgccactgtacccacctaattttagtttttttttttattttttagagatggggtttcgccatgttgcccaggctagtctcaaactcttgagctcaagtggtctgcctgcctcagcctctcaaaatgctgagattacaggtgtgagccaccatgcccrgtctgtaccttgttttttttttaaagtattaaatgtgaaaatgtatgaaatgctttagatttgcctgtccatctacacacacttctagtttttttctttctattgtaatttctatagtctttttatttctaagagtaagaaataacttattgagctttgagtagatgctgtttgagtagactttatgtttgaaaattcttgttcaaaaatatttttttgaaaagaaaccgcattaacagaagaacatctttaacctccccatcagaaagaaacatgggaacttggcagcagcataattaaaacacatagttatctaaagctctttatgagtttgtttcatctttatatgttcttggtagctttttgacaaaaacaagacaaaggttatatattgtttcactttgaagcaggataaccaaacttaggctgaattctggctatgtgctaaatttctgatttatagacatgggaaatgtttttgtatgaatctactattgtattcacttttagaacatgccttttatggaaaagaaaggagaaatcaatttgtacagcaaaaagactagtaatagctaacatttattgaatactaactgtatgccagccactgttctaagtactttttacttgtattgatttatttaatttttccagttaccttgtgggatacaagtccttttatcctattttataaaagaggaaaccgaggtacagagaggttaagtagtttaccctaggttatgtgggtaatagcacagctgtgattcaagtacaggcagtttgactatatagtctactgtaatgtcatttaaagaaaacagttatgtaattatttaaattttgattttagtcattgtaaatgtggcattcttcagttggttaggaatttgatctctgttattccttagatcttcaccaaagtgatgaaatgtgtgtgctcatttctcatccttctctccttccactctctgtgtagaattctctgtcatagttctgagcgcttggaggagaaaagaatggcatgtgcaaagcagtgtgacatggattttagttgcttggttaattgctttacattccattgggggcttaaagcttggcagtggagatatacatttccatgtatagaattctctttatttttaggaatctaaaatttcctgtaatgaactgtattaatttacttctaccctgaacattctctttttccctagcatgtttcgccaagggatgcatgacttgaaagtctggcctaatgtagaagcagatggatcagaacccacaaawactcctggcagaacaagtagcactctctcagaagatcagatgagccgtcttgccaaggtaaaaaaagtcatttggaacaggtgcaaagctctgactgatgtctattgtagtatatataccttgacattatgaactctgtcagatttttaaaaaatctaaatcttaacttttaaataattgttttattgagatataattcacataccataaagttcacccttggaaagcatacagtctgatggtttagtaaatttacagacttgtataatcatcaccactatataattttagaattttttcatcacccctaaaagaaaccgcaccattaacagtcactcccattttctgctccctgcagttagttccaggcaagtactaatctacttactatctgtatggatttgcctgttctggaaatttcatataaatggaatcattcagtatgtgaccttatgtctggaaatctgtcaggtttgaaaatgtggagcgttggtgatattttcaagatgaccacccactttttctggtgacatagccttaaagttgttagtgtaacatkctagagaagcttatgccacttggaagtgaagatgactcagacaattaactagtataaagtttctttgtaagcaaatgaagttattacctttttctttcaaaattgttttaatcaagtgttttcacttagaaatataaaaactaaattctattccgtgcattaattgcaacgctgtcatttattttgtgaacttcctttcacaaagcactgtgttagatactgtttaaggatccctttacagttatctgattaggacactttcttgtagttataatacatactttttttttgcaatcttattagtaggagtgcctctttaatgtctggaggaagttttgttgctaagcttttaacagcttgttgcctttacccacatatagaagaaatcttcaagaataagtacttgggttggctaggcttcatgcttcaacacagaatttttgtcaagttcattttgtcttttgtattgctcttttaaggaaaaatggtgttgtagcaacctgataactatattgaccaatatactattgtctgcttctcccatccataattaaataaaatttaatattcatttcttctactcattctgagattttgtttgcattctgacgtgggatataggaaaggtctcaagcttttcatatgtctacctttaagactttatcttagtgatgatctttcatttgagctactctctgtcccttttacaaaccttgaatagttaatataaattttattagaatcaattcayttatagcctgtgggtcactataatatgaaaaaggttaaattaaaaaagaataaagaataatatttttaaaaaagctcttaaattgtcttttaagagtagccattatgattcatattktaggtgaaattctaagtctgagggggaatggccagagtcaagaaatataaagctttatagttgcacagtgtaactacattgtttctctgttaaacacattatttaggcttctgttcacctaaaaagttaggtttctaatttttttccctaattctttttgatggaaggtttaaaaaataatttttgtaacaactatgacatttttcaggcatcggtgtatggagtataatcattggaattagtcccagttggactgctggttttttaatgtagcacaacgttaatagtatatctttttcattttaatcttttgaattttatactagaaaaaagatgtgacttaatgatcaccttttttatgattgaaacagtaacccttcatgcttgttcatatttgtcttttagttatttgtgcacattaacaactctagaaatgatgactaagcatgtgcagagctcaatgaggtgtaggaaagaarccttcttaatgtttttgttaattggtagcaatcattatccccagtttaaattccttagagtagccaagtggatcctactttttcaagagatagttattaaaatttatgtgctgtttgtattgttcagaatggttagcagttttcagataagtttttattggtttgtaaatctttaaaatgggaataaaaattaatgagagtgagcagcttacagtcctcctgatagtaattggagcctagctcttttccacattctttcatccctaatagaattgtacttttaacttctgaatggagtggagacatctgagcttgcygtgctgtgacagcttgcattagtattaacttatgttccccaaagactaaacagaaaccatcaaaatgagtaattacttttttaaggggaaaaatgtgtcctgtttgtagctttgttaaggaattgctccctctttgaaggaagctctttttattttttgatgtattgtgctaactcgatattcccctcttcttgatatagcagttgcttgtggtttttgaggtttcagaactgttgtatatcccagctgctattgaagagaaatgttttaaaaatgatgtcttaagatttgacaaaattggaaggttgggcacttggaaatgcattatagtgggaagagcactgtactgcgagtcagagttttggccattctgctaacttggggaaaataatttttgagtttgcaaaatcaggtgtttagaatggatgatttttatggtctcatgtagctctttaattgattctaaaagtactgatrtaggaaataattgggattatctacctgggtttcatagttattatcttactagggaataaaattgtgattattaatttgcaactttgaatgtattgtttgcaggtcattcctttttttctgcaatgtgtatgcctagggtaaagtgttacatagggcttgcctaatgtgaataatggggctttgctcttaattttgttgtttgattagtgcttgcttcttaaatttttagagaggcttcctgaaaaacaactctttcctcacctaaaacatggtcttgccttatacttgagaaaatatattttgatacttgtatggtcttaatttactctcttactctttagttaattaattaattaagttagttaatttactaacttaccggagagagtatacttcggtacttacattcttaaaattatattcttaacttaaaattattttgactgaatttattattattattcttaaattcttaaaattatgcttagatacttaayttgttcttacagttgtgccacaatagtgtctgctgtctttcactctttttctgatgacacattttaaaaagttgttcagttagattgtcactctctttctcaaaacgttttgaaattgtattaggtataataaacttttaaacatgggaaagtatttgtatgcctcctgcttccattttcatacagaaggaacagagatggtagatgtaatgtctgtatttctcacgctaccattttaagaaaaaaaattagtattcaaatagatgagggttaagtagttagaaccaaatggtttatttcttgttgcaacttttattttccatccagtgaatttactatgattgtttctaatttttgagaagacagttggcttaagactaaaaagatatacataaatcttaataatagcaaagcatttttactatgcatggtacccatgagcctaaataagtagcatagtagtaacagttttcaaactgcagtatgagagagtttactcacttatagaactacttcagtcttgattgtctagggataatggacaagaggactgtgaaatgaagattaactatttaatggcctgtgaaaagacggtgttagataattattaagcaaagaacttccactacaagccagacttaaccctcttctgatttattgctcacctattacagttgaattctaattacagtatgaatagctgaagtttgaaagcctgcttttcaagtttgagagtttttaaaagtccagttctttcaggatgaatttagcggaattaacctctctcatgattttacctgattttgtgaacatgcctagttttgctttaaggaaaaatgagtatgaaaaaaggaaacataatcattttccttaatttttattttttataacttgaatttcttagacttctagtagggaatgaaagaaatgaataatttaaatacactattacccccycaccccctgccccattttcttctttttcccatttctaagtttccctaattaatttttagtatagtgtctttccgtttgaattgatttgtgaaaataataaaagaccagacttctagagcatttattaaactttccttgtccatgacccaggcttttggtggctgtgggccttacttgagcaaatttacccattgttcccatctgctctgtttttcagcttgtcatattataagagttttatgactagaatgcatatccacctggggttttggatgtgactaccaagctttagtgtttgatttatatttgaatccatgtctttagacatgaaaggttagtgcaaaagcatgcttctccactgtctccttttcattttagcagctctgcttgatgcctttggaatgtgctttagtttctgtcartttgattaagaggaggcaaagagaaagtaacaactagatgaaaaatgctttgtactctgtgtgacacagataggtatgggaatgttgttgagtagagtatagaggtgaacactgttgcagggaagatgtggtaagatgtggtggtgtttcaggctgaaccacagagtgcctgtgtggcgtcactgtgggtccagggtctagatctcaggtttaaataggagctggattttttaagttcatttagttattgtttcttgagaataggttcatgccaaccacttcaaagagtcatttataatctggagctgcagtgtctaatatcagagccacaagtcgcatgtagcaatttagatttaggttaattaagatgaaataacattaaaaattcagttgctctgtcactttaactacatttcaaatgcttagacgcccctggtggctacaagatatctattggacagtgcacatgtcgaacgtttctattattgccaaaagttctactgacagcattgatctagagtgccaatttacaaatttgtggtgggtgagtacatctttctggtaaccatattacttgtgcctgctatctaggacaccgtatttcaagatactttggaaatgtaagtagtcttcatgatattgttgatttcttagtgaaccatgaaggagctggaaaggtttctcagatatttttctcagttttgggraatctaaaacggactgtttttttttttttttttctgagatggagtsttgctctgtcgcccaggctggagtgcagtggcacgatgtcagctcactgcaagctccacctcccaagttcatgccattctcctgcctcagcctcccrggtagctgtgactacaggcacccgccatcatgcctggctaatttttctgtatttttagtagaaatggggcttcattgtgttagccaggctggtcttgaactcctgacctcgtgatctgcctgccttggcctcccaaagtgctgggattgcaggcgtgagccaccacgcctggccaaaaggactttctttatagtatccttttaatttaaatttacttgaatatgctggttgtactgcatcttttgaataaacgttgacaaattatcacaatcccaaaataatccttgaaaatcaagattaagatagcaaggaattttctggtcacataattaattttctaaagtgggattgaagtagtttgacccactataatatttacccttgaaagaaagtattttgcattaatctattgcatcaaatgggtacttgtcctagagcattgattagaggagctccctgagattttagttttatgtacatgtagaagtcctctttcatcttcaccattgtcaaaggcacacttytaaatgttgaagacmaamaaaaaaaaaattgtattactaagttcctgatgtcattatkgttagkgttattatgactaataatagtaactacwtttataatcaccttgtatgtgtwaagtgctttaatatcaacaaaacctcttagcatagatkgcaaactaaaatagagaagggattaagatcatggctttagagaccattttttattcaaatcccagctgtgatcttgaactagctatttaacctttactaagtcatgaaatcctcttctgtaaagtaggaatagtagttatatctgtttttggagattattgtgaagactaagtgtaaatgataaaatgtttaaaggatttagcatactgctcagcaaatactgagcactaataaatgttagctgttgttattactttttttacttgcttttatttgagtctgacaagtgtaggattgggacttatgcactacattgtttttaaattcatgaaaagatgaaagcgtagagaagttaagctgtttatttatggttacatatttggtaacttgcagaaccagcacctaaaaccacgtctttaaattctttatggaaatctcttccaaaataagtatcagtgacatatgcttaagatctgaggattgagaggaatgtgtttgcatgaagaatgtattgttcttatttagaagattaaaattgaaaataggagaaaaggtagatagaatatgaagcagtgtctacactgcaggtcctcaagtatggcataaaagatgatgcccgttaagtcagtaaacagtgacctgcctatggtaagcacccattacatatctatgctatgaaagaattggagttatgaatgatatatggcttcagttgttacgaatacatacttcaaaagcaattaaaaaaacagtagatcttaagatttatttcatcatagtcagtgcaacctcaaaggacaaaggcctaggaggaaaggaaacattactgaaaaaggtgtatgttgttcaaaggaactattaataggataggracctcagtgtacaaacatatgagagraccccytagtaagtatacmagagacgtacaacagatgctgcmaaattgcggaaacgttttagagccatgagaggaagtggctatatagatatatgtgtatttttttttttttgagacacagtctcactctgtcgtccagactggagtgcagtggtgcaatctcggctcactgcaactcctgggttcaagcgattctctgcctcagcctgctgagtagctgggattacaggtgcgtgccgccatgcccgsctaatttttgtaattgtagagacagggtttcaccatgttggccaggcaggtctcgaactcctaacctcaagtgatcaacccgcctcggcctcccaaagcattggaattagaagtgtgagccaccatgcctgggccagaaatggctattttctttgtgtgatcacaaaaaatgatgcagctatgatggtaacgaagtctcattcattcagctcaggcttttgtcagattaytgacttgatcacaggattatttttcagaagtttgaggaaaaaaggacactgcttytctagaccaattttttgtttgtttttgtttgtttgtttgttttggggacagggtctcgccttttttcccaggctggagtgcagtggcacactcacagctcactgcagcctcagtctcccggactcaagtgatcctcccacatcctctggaggagcaggaactacagttgtgcaccaccatgtttgaatagtttcttttatatagagatggtgcctcacttggttgcccatgctggtctcaaactcctaggctcaagcagtcctcctgcctcagcctcccaaactgctgggattacaggcataagccaccatgctggacctctaggctaatttacaccactataaaagaagtgattaatgaaaagggagtaacaggaattttggaaaaaactaaagatgtcacattatactttgggattgcaattataatcaaggagtgcgataatggaccaagttagggatatgtcagttctcacaaagtttgagaaaggcaagatgttccattcaattgagaacctataagggaagataacccaaaaggaccaaggggttctttggttcttttggtcccattctcaaggggacaatttggcatggactaaagaaggtcttggattaaaatttgaaaggaaaaatccctaaatataacaatattttaaaattttctttcttttgaatgcattaaacgcacattgaagaagtaagcctgtgttagacactgaattgatttagttgagttataatcttcatccaagtgcccttcagcctaggagagttagccaaataatttagttaagtagtaattgaaaaccaagattgttgagaagggtagcaaaaaggcactcattgatctattcagttttcctagtcctggaaagttaactgtcagggttttaacatttacatgatgaatgaatattgaaacttaccccccagaaagaaaaaattgggattcttttgatcttaccttttttcccttttaattttacatgtagaagagttactagctaggcatgttggtgtgcacctgtagtttcagccactcagctacatggaaggctgaggcaggaggattgcttgagtccaggagtttgacaccaggctgagtaacataagagaccccgtctcttaaaaaaaaaaaaaaaaaaaaaaaagagttcacatagcaggcctaaggctgctgtgcttaraagggcctgcttgcaaggttggcccttggctgatgtctgagaactgagcttctgaaacaattcctaactgatacagatgtttcactgtgtctagactgtttccacatgtgatttatgatgagcacttgctctctttctggaagtctaaaattttggtagttgtaaggcagagattgcctttgtgaccagctcccagtaaaatccctaaactctcattcggaaatgggctttttagagctgcatttttcccgctagagatgtgaatatacttgcatgttatctctgaaagactaagatcagtcaatgttttggattttagagatatgatttaagaagtgatttttattatatagtggacatcagttcttattacaaatcctataatgggttatcaaattgrtgatttatatgaatttctaaacctgtacccacgtaatgatattttgtagttagattttggagaaatgagaaacattaaagtatccaaggaggaggtgttttgaaaaatgaaggcattatgttttattttacgcttttaagattagtagaactataaaaactgatgaaagatttaaataataatgagatacattataactggggttgaagactgacagtcaagattcctgaattacagctctcactgatggcagcttattgaatagctagctgtttctgtattcctgggtatttttcattgttaaaatgtggtcagatctccattatctctgctaattataggaatcatgccattattattattattattattattattattagctattctgaaaaggaaaattaacctcagactattttgtttataaattacagcaagctgattaagtgtacttctcctggattctgaatacacttccttccgccttgaataaattatgtgaaataatgttgatgaataaactgacattctggatcaaattactttaacagaataaattgtttagaaggacctattagtgatcttttccccttattattgttacataatttattgttttcagaatttaacacttaagktcctaaaattgctttcaattgattatatatgttagcacttttcttgggaagtttgtattctttgtaagaaatatctatacttggttaagtcttcayttggttaggtatatcacataaagaaagtgtcctttctccatagctgaatcacttaatgatttaggttatagctcaagtagcttgataatcttcggttttctattttctaatcaactgcccttagttatgatgtctacagtacatgcagtgcaatattagactaagtatagtaatttaggagggtgaatctatcatccctaatgatgtaaccattaccccatttaggtaaatgaatatacaaaatatagacagtgttctgttaatatgtatgtatattacatttactttttacccacaatataaaacaattcactttgggaggctgatggaggaggatcacttgtgctcaggagttcgaagccagcctgggcaacatgatgaaactttgtctctgtaaataaaaaaaaaacaaaaaacaacaattgggacttgaccatttgtaataatgactatagtaaaaataatctcattttctcaaaaacagtaagaacacccttatttatttaatcactaggaacaaaagaaaacttccrtcttttaaatgtatgtgttttagaggaagaaaaacggtgtcctaaagagttgaagaatgcatttgttactttacaaatcaaaatataggatcctagatataacatttgggttgagcagaagagtcttatatttttttcttcctcgaatgttttgtaaatgacaataataaacaacagaattatgataaatgctgaaattattcaaggctatcaaatttattcattgatgtcattgatatcaccaaatatacctcctagatataggtttttgtataaatatctggtatagcttttataaacatatcttattgctttgattctgtgtcgccattgaattgtgttataacaagcgtttgggaatatctcgtaaatttatttttaatgctaccttctgttttattaatcactttggtttgcttactgctaagactgtcagaagttttggatttgtctggaaaccaatgatagcaagtagactaaattagtttttgccagtgccctaaaacagtattgatttatgttctgtaaatctattttctgtctttacagttatagtttctgccagaaaaatagtaagacacttttaagactagatttatcttcaagaagtttaactaaatgaaacttttatgaagcaaatactactcttcctgaataataagatttacatgtacagtttgaaagtaaaattggagatttgtgaccaagacttcattaatcaggaagatagaagaaacttctatgcttgccaagaattaaatacataggcatatgcaaagtctctaaaacatgcacacgtacatgattctttttctaatctcagtagttcaaataaattattttatacaactgcattttgtctgaagttataaattacggcatagcttggccgggcctggtggctcacacctgtaatcccagtactttgggaggctgagaagggtggatcatttgaggtcaggagttcgagaccagcctggtcaacatggtgaaaccccttctgtactaaaaatacaaaaaaaaaaaaaagaaaaaattagccaggcatggtggtgcatgcctgtaatcccagctactcgggaggctgaggcaggaaaataggaaaatctcttcagcctgggaggcggaggttgtggtgagccgagatcacgccmctgcactccagtctrggcaacagagtgagaccctgtctcaaaaaaaaaaaggtactgcatagtttatatttgatttgagacgcttattgtctttttttgaagaattacacttttttagtaatataattctagtgcaccatgcaactatattagcagacaaagatattgtcttcaagtatttattaatttagctcagttctattttagactcagagaggcattagagtcaaaagagttaagctatggcctttaacctgagggagtttagaggaatgagatgggaggtaattgacaaaatgcaaccctgtacaatcatataaagggttactggaaaaacagtcttttgtatatagtagtaccagacattattaaacacctattgaaaaatggtaacatcttctaatttatatggttttgtagttggatctagttgaagggcccttggaagaaagtgagagagcaatcaagtttatacttsgattttatttcaggtggttaagttaaattaatgagatagggctttattctttgagcttttattatgaagtgaaattgctttatttagcattatctttataaaggctaatctttagtggttttcccaacggagctttctccacaattaattgtttcttaaattactttagcttttaaatgacttttattttttcttactacaaagataatatacatcttctacagtggtagaatattgttaaagcacaaagaggactatgaaagtcaccccagtctacctaccactcaaagataatcactagcactttggtttatatgctttcagtaaattaataaatgtatgtgtgttatagatgaatatgtgaacatttattttaaaattagaatcataccgtatctgtgtgcttaattgaatcttgcttttacatttaatggtgtctcagaattgttccaggttatttaagatacttctaccacataatttgtaaaggctggagggttttgcatagtgtagataagtcataattgatttcagcagtcttctatggttggatattaaaaatgtttgaaattcttggttcattttctatttatttgaaatgaaaagtgaggattatatttttaagttgtttttagacaacttacttggtttgctcatatcctgtatttccaagttatcagtcataaggtattactttcatatcactgtttcaatttgtagttacacttttaagtgcttactatattgaatgactcacttatttccaccttgatgttctgttagggcagagaacttgcttcttttgttcaacattctatgctcatctgaaggacagaggacatgatggaagtttgttacttaatagccagcaagttacatatatttgtattgagagtgtataaagattagggaagagtgaccmagggcaggaatcttttttttttttctctctccagcttcctttttagtgtcactcccacctcttcccctgaagccccaaagctctttgggcagaatatcagagtatacttacatttgttttccattatgtctgtcaccctttcacatagaaagcctttcaataagtataaakagacattgaatgaataaatgctagcttctattgaacattcatagctcttayactcaagaagctcatttgtctagtaaaatagagaagagtacggagcaatgaactgtgagttctaatgatcgtggaagtctgtctatttccaaggatcactatctgctctgaaatttgttttccctgctggtcttattcttacacagtgcagcaagttggcctacttttggctctgtccttgatacttttattaaacacctactaatctgagacatcttcctcaaacacatctttttgttctttcattaaatctgacaatacagaattagtactccaagaagtttcccaggcatgttgttatttggttcttgtggattcttttatttaaatagcttttaaaactccttgctttttaattcttggagaagttagggctaaattatgccttttttttttttttgtgacagtgtacttttcttccmaactctttgtgacttcctgtgaattctgttaagaaacctgtgttcctttaaaaagagagaatgawtttttttttttcctgtttcttgacctatccccatcctagaatgggcatcctagtgaggattatttcttcaygagtaattgaaacagtttgtcctacttttacctttctgcttaacagaatgcagattttctctttggaaagatrtaaatcactgacattacagacccaaaattaaatataaattgttatgccacctgtgtctattgttcatttttggtctttagtatctatagaagttcgtggattggagataactagaagttgctttgaactgatgaaaaccactcaagtatatctacattgttatcagcacccataagagatgaagtgacataggttatgggctaattagaatagctgttacaacttacatagtgctttatagttttataaaattaataaaaaaatttaatataattaataactaattatttcacttacattgagcagtaaaggtaaacggctttatggtttgaagarccagaagagactgtgttagctggagtttagtgagttcgttggagaggtgaaggagattattctgaagaggaaggcagctatggatcatttagcaattgtgatagctagttctagactttttctgctgcctaaagtccagccaagagctgactttgccatctctaaactctacacacctgctcccttgcartggaacaattaattgtattatttgcttggactctctgataagtaagcgctgtgctagctagtctcttaggatggccctcaatgaaatatgccttctgatagtcacactcttccacattatattaccttgtgactgattttaactgttataatgcagcagaagtgatgctgcgtctgttccaggcaagacagcgtgacagctttggtttcttcacatgttaggaacattaagccatcatgtaagaagtccagctattctgttggagtgaccaagttgaaaaaccacttggagagggagcagcactgagaatacgtggggaaagagaggccctaccaccctggtatcccggctaagcccaccctttatcaccaaggtgttagaaatgtgagtaaagccagcttggatgttccagctctaaccacccaatgaatacaatattatgactactgataagtgagactacaagaaaaaattatttaaatgtctctcaagaagatgattttgccaaaaaaaagataatgagaaacaataaaatgaatgtcgttttaggccactaagttttagggtggttcgttatgtagtaataggtaaataggacaggcatctaggagacattttgagtggtaactgtacaattctgtggaaatcataaaattagctcaaagaaatacacagaatttttgctgtcaatctcaaagtcaggtacaggagacagacatgcaaacaatttccatagcataaatggtacctttaattttgcaatcggttttgcactcaacaatatctttcctgtgaaggcatacagatttttctcattctttttgattatagcatttcatagtgtgtgtgtactctagtttacttaacagttctcactattgatgaacattttcattcttttgtgtctaatttttctgtattgcaaatatggtgcacaaatgtgaatttctctagtataatttaaacttattttcatagtgactgtaccagttttagtactggcatgctgtccatacattctttagtagctcttatacaattgagataggtcatatttggtattcaaataggaaagctaatcatatgctatatgggagataatatatattagcagcaaacataaattctagagctagtgaaaatggctttagaacatttctaatttgtctggatagttttagtaaaggaggaaaaaagttcccaccacattctcccacatccaaacttaatttaccattgccagttctttgctcataggaaattarcagtggatcaactattgtatcataaatacaaaactaatattcragaaacgacagaattgagtttcacttaaagctcttagtacatcagtagagaggatagcagactggtggtaggagtataggctttagaatcatatagtctggggtttaaaccctagcttggccacttcatagtagtagttgatagtcatctgcaaactggggtcaaaatagtctacaaaatagtgtggttataaaaagtgcctataatttggcatgtaaataaatgttatttttttctccattcctataggaagtatataaactcttattactaatttttactgttacttcgttcgtacaagcaaaggatgtaaaatgaccttttacattttcatttattttgaaaaccagtttggagcatattgcgaagtgagtaagaatagaggcttccaatgactgcatgaaataataccacctgttatattttgcatctattactttatttgagttttgggagtaagaatagatgttaatacttgaattttattgatgtgggttcagaaaggacatagtttgaaaatggagtattaaggttggaactctggtctwccagctcctactctagcactcttttctgtaggtcacattgtctgatcttcttttggtttccttgtgactatttctaggtctcttyccatgttgctagcatatttgtctattattccaccagagccaccacgatatttagttcctgctttttgtaatcatgctaagcttattaataacttttcatacattttcatatagaaattacctcacatgaaagggaattattggaagaaagctaaattgatattacttttttttattacaatgaacttcagactttttgtgtgacattagtatttttatttctgaaatagtatgaccacatagttgtgatgagttgaggaagagaaagaagattgatagtgaagatttttaattctgcaagagagatgaaattggtggcagtgtttgctgttcttataggaaagctgtcatgatatggacaatgaagcagaagaaactgatatagataagctactatgtaaagctttgatgtccagttttgctttatactgtcaatttgtttagaaggaatgagaggggtgttgatttttagtattacagtttctaattcaaaacctggttctaatttgaggtccttggaacttaccaggaattctctatggatttgaagagtcaatgaattattaaagttataaaactaaggttagattggtatgtaagacctcacaggactctaccaactgctattctagaaaattgaagtcttttatcaccgttgcctaaaattaaagcatacatgcatatgtgtgagcttaaacyttagagtattaatgtgcaaacccagaaaaataccttattacctgtaactgtcattttttcatgttggttagatacattgaaagatgggaagaaaagagaaaaagtggtttatttcccattcatgaaactattattataatttcatctctttgtaatagtcaaaatacaagaaatataggaacacggagataatttcaggaacaacttcattattctttatcatgtcaaaatatggcaaattatggacctttttaaaaaaaatttaattgtttttctttaaaaaataatgatttgtctcttgccaagtttcttatcctgctaattgcgtatggtttctattgtgtataggaaagtatcatatgtgaagtgtacwttgccattctgacatttttggtccttctttctactagatgtatattaaaattttcgtcattgtatttattctgcagctcaccaaagctcatcgacaaggacacatggtgaaagtagattggctggatagattgacatttagagaaatagaaatgataaatgaggtgggttatatcactcttttattttaaaatattttctgtaaatttttaaattaacaattttttgataagaattattattaggtatcttacaaatataggattatcagggttaacccctgtagctgggaattctatgctaataactggaaaattggagatatcagccttccctatattttaacgtaatgtcaaactatgaagtaggtagtggatattcaaagatgttctaaatatcatatgagtgaagcctatgcagacttaatgcctcagtggtgtgttctctgtcatatcagctcatgttcaagtcagcgttggataaatcttccatcagcacagtgccagcttttcacttcagttaccataaatcatttcagcaagttctctcttcaattaatttattacttgtctatgtactacatataggactccgcaccctctataaagttacatgatttaggtgatttttttcttgaccttgtatgtgagccagtgtgtatgtttaaataaagatggcttcaatgagagtcctgccaaaagttgtaacaagaatagtttacttttttgtatatttgctctaaaatrccagatgttaggcctaatgttccacatctagagaacagaaacaataattatattaatcaaattaggagagaaggacatcaatttgtgatttgtctaatttataatgaccataaggcacaacttacttaatttatattctccaaataattttcagcaggtagaaagagagaagtttttaattttacagtgaactattacaaaagttagattttagcattattcttttattttaaaataaaggtagtgatgtttaacaacatttatattcaattctcgtatttggtaccttttctaaatttattcataatacattcctatatacataaactggaaggaagcctttttaatttttataatagtcacwtttcaaaaagagtttactcataatactaacttatatttttctcttcttaaacttagatatcactgggtatagaaaacgtaatgttagagtttgcccagcctttttcatatttttacattttaatttctttraaagaaattaccattaccaccgcattactattacaaaatagactataatatgcttcataaagctgaagaatttaagtaacctcttcagacctttatcatttattatttcttttttttgtttgttttttttgggggacaaggtcttgctgtgtcacccaggctggagtacactggtatgcttagtgcagccacaaacttctggactcaggcagtcctcctgattagcttcccaagttgctaggactacaggcctggctaatatttttaaaattttttgtagagtcagggtctggctatattgcccaggatagtctcagactcctggcttcaagcagtcctcccacctcccaacgtgctaggattacaagtgtgagccaccatgcctggtgattttatgttttagatgtaaagccatttataaaggtgttttgggtcaaggctaatcacccgcttagacttcattgtattttcactttatcatcaccttagtatagtcatgtgcctcatcatatcatttcagtcaacygcagatcacatgtacaatgrtggttccgtaagattatagtactttatttttactgtactttttctcttttaggtatgtttagatacacagatacctaactattgtgttacagttgcccacagtattcagtacagtaacctgaagtaacaagtttgtagcctaggggtaatatgctacaccatataacctcggtgtgctataggctataccatctagatttgtgtgtttacatttcatgatgtttacacgactaaattgcytaatgatgcatttctcagaatgtacacctgtcgttaagtgacatgtgaccatgtttgcttttttattttaaaggggacacaattatataaataacttttttttatgttggaacaagaagtaattattccgcagtatatttaaagtgtggataaaaatttacaaatgacaaatcattttaagaccatttataaattgcgaaaaacttgtaaaggctatacttggtaaactcaaatggcctctgttcttaggttgcacacttttcttccttttgatttttgttacacatattgatttctatggtttagtcatataagttaagggtgaacttagcttaaaattgttagaaggaaaaaccattctttttatttttgaaataaaatagttctcatgaacatgtgtgcaaaataccttcaagattataaacccaaactactgaataaaccmaaaatgttaaatttgagaaagcagttataagtrcatagtagacactactgaataaacagtagtgctgtctataataaaataatagtgctgtgtaaaacacactacatgtatataataaaataaaaatgtgttatgttttgacttgtatttgatagatacatgtattactgaattaggaaaaatgatacatactgatcctttaagagaatgttgaaaataatcatttttcatgaaaatcattttttttttcagagtgaaaaacgaagttctaatttcatgtacctgatggttgaatttcgatgtgtcaagtgtgatgataaggaatatggtattgtttattatgaaaaggtatttcccttggaactgtttttggtctctaaagtagaggggagaggaaacattaaaaaaatattgttgttcctgctgggatgaattatttggttgcagggtagcagcagacagctgtcagcagcagctgtttatgtatacagaaatcaaatcatataactacaacaagattacaaaagcctatcactcatgtaatgcagttctgggttacagaattcaataagtatgcaagtgattaaaaactttgtgattaattgttctgcaaattggcaagtaggacactaagtaatggcttcatttactaatattatttatttaaaaaatgaaagggggaaattatatttctaagtggtaggctatttattgaaagttaagagtctgtttgttatttgagtgtatgtgtaatgtctatatgtggccctcactgaagtatacttaygaaatacttcagaaatgtccatttgtacaatagatgcaaaattaagacaattttaccatcaggctgggtaataacaaatatgcagttatagatttgctttgttctgcccattatgctacagaaagtagttctgtgtttattatgtacctacttgaaagtatcttccttaaatgcttgtagaaggtgcttcatttaagtactacagaaataattatatatttaagtactacagaaaataattgtatgcaggccaggtgtggtggctcatgcctgtaattccagcactgtggttggctgcgtgggaagattacttgagcccaggagtttgagacccgcctgggcaacatggcgagactccatctttatttaaaataaatataaaaaaaaatgtaygcatagtttgaaaccacataaartatcttctattattgtgttaatagtcaacaaatgttaaatcagcataaatgatgacagacttttgatacatggcatagtagtagattaatatttcttctagcatatgaccaagctgatatgcagtgtatttgttcattagaagcagtccttttaaattaaatttacattttattgttgtttattaaagctgtcacaagtgatttttaaaatatgtatacttttataaattactatttgaaaggttttcataatgaaggtttgagtttttacagtttatttatgatcttttttcaagttactgttcatatttttgtctttaactcatatccctttcacgttagtgaaagactaggaagtgttaacttgtttctgccttttattttataaatggtactccttggatagattatttaacattgtttattaatttattagaaaaaatacatcaaaacaagggaaatgtgagtgaaactgttctgtcaccagtgcattttaataaaatcrtattttacattttaaactatatgtcatttcattaaaggcagtattttctgcccatatagagtttgtattgcaaaaacatgctaatggagatggtactttcaaacactggagatgtgaaggatcctttgaaagacagcttgatagcagatgaaataataacagaatagaaattagaagaatttcaagtatttttgaaaaggttcttgacccctttctaccacttcctgaaaattgctcataaattaatgcctgtctacccaccctgtcatatttccacttagtgtaaagattgctgggccagtgtattgaatctaatggaaatagactttcttgtcacctgtcttgtgacagatagccttagtgaagattacttgtcacarctaggctgataaatgtgttttctggtgttgtgactgagaacaagcctgttaaacaacggctgtgggaatttgtggttttctgtaagactcaattactgaactgaagtaaagttacagtgcttccccgctttcagtctctcttgagtttgttgcccatatttaaaattgaaaacatactagcatttggaaattgacagaaaagcttgatgctaaatatacagtcatgagaaagtgaattttgaccttaattagtttagcctttttccagtatatttggcagtgacatttttatgttgaattacctttctcacattggagaaaaataaaagccaacattcttcaaaggtgataataccaacaaaataggatggctttatttctgaaaaactgattgattgattttattattcaagtttagattatgttgagcaggtgtccctttgagaaacaacgttgttgattctctagctgtgtgtaaatttgagtaatattaaccctacacttaaaattctgcttctttgaatggatctccattatgataccttgaaaaattaccaacatccacttagtttttgcaaatgatgcaacacatccattgtgccacattttacatatagtctgtggtttcttgttctgagtttgaaaattagcacgtttttaaaaatccactgtcattatatgaacgaagtttaaaaaaaaggaacaactcgaaacaatctaatttccagacctcatacctctaaaactttagtaagaattttgttagagtttttctcaaaacaatttcataatcaaccaaggagaggtacaaagtggacatgcattttataatattgttagaagaagataaggatttctttaaagggaagaatgatgttcatcaaatagaattaaaatacattgatgtgtacatcatatactgcttcctattgtattaaatttctttttttaaaaaattattgctctgtaatctaggacggtgatgaatcatctccaattttaacaagttttgaattagtgaaagttcctgacccccagatgtctatggtaagttattgtgcaatttttttatgaaagtacttttcttcagagtaattgtgagttagccacatcatgtactttctttaaacaaagtaatatataactgcctccgttacctaaaagtgattcataaattcactttagcatctaggcactgtttctgatggaattttatgaggaatattaacatcttaaaactaaggtaagggtagagtagggttgggcatccactttgtttgaattgctgaaagagctaggcagtatactctttttttttttcttcaggttgggggkatataatcttgaagtgaagacttggcagaactggtatttgaaagattgccatcatacagaaggagaatttgcctgttacaggaggattctataaccaggatgaatgcgtgaaagttttagggagaccaatttgttggaaaatagggaagattgctgtagccctagaactgttcaatttggaacgtggtaacttggatgatggtgggataccttcttattaacgaatttttgagatgatagctttcagggatatgaggataagaattcatacaatgcaaaagaggtttaattagatgactttagaattacaaacttgtaggcacaaaatccttttagcagcacgatagttaccatgatttttgcagttacagctcatttacatcattccaactctttttgttctaattttatacatttctaattagattagttaccttcctcatcagaccaaagtggattaaaattgggacattggatgatgaaaacatgatgattgagataagtacaggtcatgaaagcaggaacggctgatggcctaatatcaaaggaagagatgggcagcagggaaagtagagtataaaaagttaaaaagaaaaggccacttgcggatctggtaggaacattctaaagaccttgatagttcctatgcatagtatagtagaatccagttaatcccaaattggcactgaattttcagtataaaatcaaattatattttacacttttgatattcagagcacacactaagtatgaagaaattcagttcagcctgcagttatagttatttgttaaatgcagaaacacattttaaatgtaaactttgggtgggrctgagatgatatacagctgtatctgacaataaaacagactataattacaataatgtggtagtgacacacatgtgtaaaccaatatactggttgaacagaattaaaagcccagaaatacatccaagtatgcatggaaatctagtatatgatataggtggcatttcttcactaagtcataatactgaggaatggaattaatttggaaaaaaataataaaattatatccataactcatgccatacataggaataaactccaaatggatctgtaatctaaatgttaggaaatgaaactaggccaaacatggtggctcatgcttgtaatcttaacacttttgagaggccaaggcaggaggatcacttgagcccatgaattctagaccagtcagggaaactgagggagaccccatctctacaaaaaaataaaataaattagccaggtagtggcacgtacctgtagtcccagctacttgggaggttgaggtaggaggattgcttgaactcaggaggtcaaggctgcagtgagctatattcatgccagtgtgctccagtttggtcaacagagcaagatcctgtctcaaaaaaagaaaccacactagtattttactgtcagtgtagggaaagactttttaactgtgactcagaatccagaggcaataaaataaatgattgataaatttaactacattttaaaaattacatggctgaagagaccaacaaagccaaaagacagttaacaaactgggagaaaatacttaactacatacattacagatatattaaggctgatacataaagaactcttaaaaatgaaggacaaaggaccataaagccattaaaaaaattaggaatatgacatagacaattcacacatgcaataaaaaataaataatataaatttatatcttgttttaggcaatgacagtatggttaaaactaataattttgtccatgggtaaaatagcaccagatgtgtatattcaagcgttgtgattattgtccttgccctcagtaactgatagcttaaataactgctaagatgataatacagtgacatcacaaggtcattagtagctgacaggaggaaggaatgctttagtctatgttgtcagggaagattttacagtgatggtgatatttgattggttagaggatatggaaaccttgaatatgtggagagtgaagggacgatgttttaagaagctgtaatgacgygtgtattatgggactagtggagtttaaggcatacttagtttcccagtcttgagaaggatacatatttttaagatatgtagaagactgctaaagttgtatcagaacaaaacattagatattattaaatgctcctaagtaccttttctatttatgaatagcttttgaaatttccttttggtgaagtttacattgtcaatattttaaaataatttgtaggagaatttagttgagagcaaacaccacaagcttgcccggagtttaagaagtggaccttctgaccacgatctgaaacccaatgctgccacgagagatcagttaaatgtaagagaattatgaaatattaatttaaaaatagttaaatgggtgttctggttgaaactgatagctatcacctcacttaaaaattatttagatgcacattttctccaggttgatgaatcctacatcatgttcataatttcacagatyagcagttctgttatcatttggggctttccataaatgtgttatctctggagacagaactgcatatactgtatactttcatgtcagtagtattcttagaagctggccctaagacattgcctgagaggacttagtgtgtacacatgccttgttgtatgcattgactttaaaagagtttattgtgtgcacatttttcctttttctggtagaagacgttgttattttgctaggttttgtttctggttgaattaaatgaactctccagttaaatattttcctatggaatatgactttatcttcttttcttctcctttaaactgcattttggacacataattataacaaatttaaggcctacttgactgagtttacattttccttgcttgtgtaataattgtagtatagaattatttaaataaatgaaaaatattaagtgaaatggaaatatataggacatgtattgttgacaaaattagttctttttctttttttgttttagattattgtgagttatccaccaaccaagcaacttacatatgaagaacaagatcttgtttggaagtttagatattatcttacgaatcaagaaaaagtgagtgtcttgaatattttcatatatcaaatttatctaccaactttgttattaatgatcaagatgaggaaaatgccatggaaattgttattgtcactttaaagaaaagttacagagcagtatatatgagactccattttttaaaaaaattatgaaattctgcatacaaagacacctgtacctgtttgttgactcatagacaatgtctgaatgggttttgaagtcagagagacttgggttcgttttccagaagtacattttacgtttgtttggtaggatgaggcaacttactttggcagcatggtgtccttattattctaatggcgacagttctccttcacaagtaagataatacaggtaagtaacctggtagagtatctggtgcatagtaggtgcagagtaaatgctggttctcttcttcttacctctttgaacctgggtgactaggaaaatacgtatgcttttataataacgaaactacagaattctagacgagatgtggctggagagagagtatgagaaatataatttgagatgtgggaattcagttggtggagtagcatacaggttggcatacaggataacgggtaggtcaaagctcaaagctagacatttgcttcctgtaataaaaccatggagtggataaggtttctggagagagaattgtggtaaagtagtcatcactaacctgaagtctttggacacttagtcttgagtcttactgttgcccctaagaagctttttgactacaggcaaattactttgcctgtataagctttagttttcttatatttaatatgagacaatcagtgattgtgaactttgtctcctagtttttaaaatagtctgtaaaatcttaaaacagagagccaaggggtacctcttaaggtataataataatagctagcattttttaaacagatactatgtaccaggaattctttaaatcccataacaaccccacaatgtatgtattattgtaactgttctacaggtgaggaaacttgagcctcagaaagattaggggacctgtgcagactcacaaagcttatacatgctgcctcttgatatgcttgcatctacgaattagaagaaaagaaagtcagtgaagacgtagaaaagagaattatagagaaaacattttcaacatcatatacatgccttagcagacaccctgaaatgcattagaggaagagcagagaagcattaggaaaattaatatctgttcaggaagctgttacatatttatttgagaatgaatggatatgttttataatcttgtgatatggtctttactattttaagttgtttttctgaaccaaatgtcctttctttagtttctaaagtaaagataaaaatccagttacagctcatcttaactcttcagcttttctgctttgtcatttattgatgccttaggaaattctttgtaaatgaatcatatttattctcctttatatccataataagaatgagagaagaattttcaatttactatagctttgagtgtaattctcttcatcactgaagaaaaggaaatattcactaacagaaacacaggtttgtgatttgtgttttattaraagattgagttagtgtcatgatactgtgttaaatgaagaataaccttggtcacagaaactgcatcttgaatgcagctcagtgtcgtcttaaatacacagctagatattgaattgaacctgttagaatgtataggtttaaaaagcatacaggagtagatttacagagcagaacttttttagatagaaaggtttgcaagaaaaattgtttgtttaaacaagtagtcacttcccaccgaaattcaattacttctagatatgtgcaaaagaaataaaatgttcaagtgatataaagtgtgtgacaagtttcatttaactagttgatttcaagttttcgaaaggtgagtgatgaaacttcaattctcaggatatgttataggattcttctgaccactagagtagagtgaacgatatgttttaatgttcagaagtcactatggagtaaaccaaatatatataggccttgaagtgaccaaaggaattattcacacagccacatttgtaaccttgtaataatttcagatgggttttgtgaaaaacggatactctcatactccacccattaatttatttacagaaagaaattcttttagcgtcagactctcagaaattatgatttaggttacttgacatttgggccctggggctgaaaagcttttctagagagaaggcagtgctcagaaaacaaattggaggaaattggttctcacaaagtcacactttttattttttaattaaattttgtctttctaccccctttttttttccttaatgacctaagtatttcagatgaaaaccttctagtcaggacttgatgtttcacccagaaagttcatagtaataactttgttcaattaaatttgttaccatttaaatttatgaagtattttcaaattcacagtttatagcatgtaggaagtgacccatttctgtggaacctgaaatatgaatactgtaatttttcaaaactatttgacaaaaactgcaattacttttgcaccaacctgcttttacaatggacttttttcttataaaaatactaatttaaattaactccatgccttttgattatgcttgggggaaaaaagcagttggaagagtcatgtatagtgaagataatagtgatgcactgagtgttcttataaggctgtttctgagacagtgacatgaggacaatcatcatatttgtgtctcctgacaagaaattgatggtgacccatgggataaatgaattcagttcagcaagtattcattatcacctcttggcctagcattatataagactatgagctttcaggtatcatgtccttgtattcatataaattaaaattgttttggggtaaggatatttacacataattaaaattaggaagtatagcatagtaattgattaagggtcactctcttaataaacatataagtaattaatataatataaatgtggaggatgaccagatcagtgtgctgtgacatgaggaaggtttcacagaacaaagattgcccttaaagtgtgagcagactttgatagcattttttatttggtggtcatttttttatggggcaggaaagcatgagtaaggtaggctgttaggttcaggaaacagttttgcatgaatggttatgaaatagaaaagatggcatcagattgtgacgagcctcaaattatacccttaggaattcaattttactggcgacaagaaacgactaaagcaggaaaatgtgtgttaacaagtgatattgtacttctctttttttctttggagacagagtttcactcttgttgcccaggctggactgcaatggcatgatctcggctcactgcaacctccccctcccaggttcaagtgattctcctgtctcagcctcccaagtagctgggattgcaggcgtgcaccaccacgccggctaattttgtctttttagtagagacagggtttcaccatgttggtcagcctggtcttgaactactggcctcaggtgatcaacctgcctcagcctcccaaagcgctgggattacaggtgtgagtcagcacgctggcctaacaagtgatattttaaggagtacaaactagggtagattggagcagagcagaaaatgaaaaaaagtgacataattaggagaatcatatactgacttagagaacagttttggagggcaagggatggagaagaagctatacaagtaagttgactttggagacaatggccaggggttaggcctgaacctgatggatttatataygtgtgtgttcataccccacttttggtaccaatttactgtattattccgctttcacacttctgataaagacatacctgagactgagaagaaaaagaattttaatggacttacaatttcatgtgactggggaggcctcacaatcatgatggaaggcaaggaggagcaagtcatgtcttacgtggatggcagcaagcaaagggagcttgtgcaaggaaactcycccttatatagccatcagatctcatgagacttactcactatcatgagaacagcatgagaaagacctgcccacgtgattcagttacctcccaccatgtccctctcataacacgtgggagctgaagatgagatttgggtggggacacagccacaccatatcagtaaggatatatcgcaagtgggaagaaacgaatgagatgttttcatgtttgagtatttggaatcaaaagcattggaaaagcagcaaaatagacatttctgagaatttagttggtagaagtttaaattaggaatatatatatgagatatagtattttcagttctggggtgattgtgattctaagaataggagacaactggtgattttcagatcaaatgaataaaacatagtaacacatatagtaaagctaacatttgatgtcaacatcgaaatagaataaaaataataactgataataaactatttactataggatactgttacaaacattttacattcattaacttagtcttcaccacaagcctatgaaaaaggtctcttaaaagttaatgtgcttcaatttagtcagctaataattgatagagccaggaattataattggaacccaaacaccctggctctacagcctgtgctctccagtaatctgtggaagttacacacagagagagaattgctctttacaattctctttacatytttacatggatcagtaaagcatctttaaaagacctagggtcatttaaaaaggccattattattgctgtcttcaaattcttactttttgtctttcttattctttgactccttgttttcttcttcattctgttggctccttgtttacatttgtaacatttaacattaaaaagttgtgaaattctttgtacagtgccttatgttttttggcagcagcatacttcataaatcttgctaataagtctataaatctgagaatctaagttttagattgtttcagttattgaattgagtacatcggcatgctacaagatttgcttataataagtacatacccgcacatttctattaagactgctgatgtactgtgaaatggaaaagctttcactgtcattatttaagaagtattgctttgtttccacattcaacctagaaatacgttttagaagtggaaaataaattcatggaataagttagtagggcaatctgtgttctatacagaaagggagcattatactaaatggtgtgcaggaggtgtagaggaagtggacagctgtccttggggaatgcagactccagttatagagataaaaatgcccacaaaaacatttggcagttagaaaaacatcatttaaatgacagtagtaaaattgagccrgcttctaaaggaatagctgaaagttgccgaaaacttcctgtaaaactttcaacaagatgactttagaggagatgatatccctgtttgatgaagagtatatgggaggaatgtacacaggggttagagagacattgttaatgtaagttaactgggctgaagcatggaagggcaatgagaggttaatgaaatgggtttgcattgtggtaagtggtagcaatgaaatgttttgagaaagaagccaaggttatttgtttatttacaaattagaatgtcctatcatctagttgaaaccactttgtaacagtatggcaattatcttcaaatattggaaaggttgtccacatcgtatggggctaaatttactcccattctctacaaagaatgaaactaaccaattagaaaaagcaatatgaagacatttttgtcttttggttcattatagttaaaatcaaaacaaaacaaaaatggcttagctttctatgaatataatggctattttggaaattagttcctggagtcacttaagtaaatattgggtctctttttggcattcatgttgtggggtatttctgctaacaataggaaatttgtgctaagatcacttccaacttgagcttctaagagtttgtatgaaatgattagaagagaaactcgtatttagtttcttagctagaaggctctgtccaactccagatgtgtcatataatgagaatcaggctgaagacaaatataggagatattgctaggaaataattgaaaggaactggaatggattcaggagattagtgttgtcagagtaatggctccaaggggaatgggactaactagggaatggagcgccttaatggtaaggaagcaccatctggtggaagaagtatggggctgagaattggtggacctgagttctacatctagctcatgcaccatcttgaggtgatgggcaagccatttatctttgctgaggttatatacaatttaagcattgaactagacaatctccatagtgccgtttttcttaataaaatcaagaataagttaggggatgggtttgaaggttcatttagtgtcatactaacagaaattatgttttgttgtccaagtagacattttcttgaggaattgattagtttactaataaaaagattttggttgggcagagcaggggtcttaacattttcaagttacctatttttcaacaaatagcaacagaggaagacaaagaagaagaaaacatcttgggttcagccaggaaagtgttgcctttgagacccagcaataagtattgctttttatggaaagcaagtacatgcttttctttattttcatttgtttttgtagagatgagttcttgctgtgttgctcaggctggtcttgaactcctggcctcaagcaattctcctgactgagcatctgaaagtgctgggattacaggcatgagccaccacacctggccaagaagtgtgtacctttcttaaaagaggacttactgtttgtgcaatgagtgatatactccaagacaatttgcttaactgacagtcttgtgaaaacttccgtgtgctgcctattcaagggagtgaggttgcagaaagatgtacaaccagccagatcataractgtttgctgctgtttctgtacttacccatttttatgcttctgttttgaggttttgttggattgcctatctttttaagtagttacttcacagagatacgtacatactccacatcgtttgagtcttcatgtttaagtatctgcgaaagccggtrgtcatactctagggaggtgatcgagagtgaggctattgggaatttctgccctagcatggcttccggcccttcgctcagtggttgcagtattttctgttgtaaaatataggttttctctaaggcatcttagagttcgtgagaaatgcctcaactatttccatgtcttgagccctgcagtattttaaaataacaatagcaaaatgaagaaaagccaaaacaaattaaaaaattcatagtgctcgcaaatgatttggcctggaaaatataaagatacagggaacatgctttttttctgtcctgcagtgcttctataagatcatatatataacttcatttagtgcttacacaaggagtctatcactgactccgtggctctgtcattaggacctagtggaactctgcctagtcaayttctctatcccaggaaataggctgtttctaatttttaaatattttctgattttaggccttgacaaaattcttgaaatgtgttaattgggatctacctcaagaggccaaacaggccttggaacttctgggaaaatggaagccgatggaygtagaggactccttggagctgttatcctctcattacaccaacccaactgtgaggcgttatgctgttgcccggttgcgacaggccgatgatgaggtgcattattatttattattctgcttcaatgggtcattttaaactagagcctaattataaactatgtgtgtatgtgtgtgtgagagtgagagagagagtgtgtgcacatgcaagagagatttttagaagggaagaggatatactaggtgtattttcagaaggaaaattaaaatatgcctcagaggactcctctgtgaaatgaaaatttacttcctgatctgttacgtggtaggacagtctctcccaggacatttacctggcagcagagcttgtattgctctgtctggaagaaggaattctagtgaaaaatggtttaatgcagcaccagctagggaataattcagatctcctctatcagtcagtatacaacaagccacatttaattgtagccttgaaaagcccttggggcctttaaagcttagagatgcatggtcatcttcctctccttcaaactcgccttttaaactttcagctgatgacaattatatgtatatgtagattttctgaaggggttttggatccttggaaagcaaagattgccaactatatgctggctatttatatacagttatttatcagttaatgacagggaagtgttctgagaaatgtgtccttaggggatttcatctttgtgcagacatcatggagtatacttacccaaacctagatggtaaagcctactacacactgaggctgtgtactcctaggttacaaacctgtatagcatgttgttgtactaaataccttaggcagttgtaacgcaatgctaagtatttgtgtatctaaacatagaaaaggtacagtaaaaacagagtattataatcttatgggattactgtcatatatgtggtcctgtcttggctgaagcattgttatgtggcacatgactgttcatgtaaggccatcagggaaggaagaacacttttttgacaaaaagcattgctggattttgggctttaataattctttatagatagactaatccagcaacttgttttcttaatttttatagggtgaatatgttcttaaacataacctaatagtttatgctagccagcagtactttatgggatgtggagtaacttctcaagcttcaatatatatagcaatgtcgatcgcatagaacaactattatcaaatacctttttaagagggaggggacagtgagatcattttgaattagtggtatctgaatttcaagaagcaaattaaatatttattaaagttgatcattgtatgtgtgtatttaattatggtgaaatttaaacactaaagtaaatagtataatgaaccccaacaaataattcatctgtcttcagcagttgccaatttataaccaatcttgtttcatctgtaacactgctcagtctctccaccccaaccccctaacctctactagattacatccttctgacttctggcctactggctttaacaaatcagggggctcccataaccctctccttgggtgtgataatttgctagaatgactcacaaaactcagggaaacattacttactattgatttattatgaagggtatcctaaaggatacagaagaacagctagatgaaatgataatttgccagaatgactcacaaaactcaggaaaacattacttactactattgatttattatgaagggtatcctaaaggttgcagatgaacagctagttgaaatgacacatgggttgaggtcctgagcacaggagcttctgtccccatggagtttgcagtatagcaccctcctggcwtgtgggtgcattcttcttcaccaacccaaaagctctcagaatgctgtgcttttctgagaaaagcagaaaaaatcagagtttttgtggaagcgccattacattggcatgattgattraatcattggctgctggccgattaagtcaatcttcagttctctctgttccccagaggttgagagggtagagcttaaagtcccaccctctaatcacatggctggcttttctctcagccaacccccatctttaggggctttccaaaagttacctcatgaacataaactcaggtgtgattgaaaggggcttgttaggaataacaaaaaaaatttcaatgccagcatgctatattttgtcctttttattttagcatgtcctgaactctgtcactgtagatctgccttattctttctaaataacagcatgatattttactgtgaatttttttgttaatttacttaaccattgggcctcttttataggctgttgttcccattcttttcctgtaactgtattttagtgaagaggtgtgtgggggagggtaggtgggtatgttttaaaaatcatattctttttttttttttttttttttgagatggagtcttgctctgtctcctaggctggaatgcagtggcgtgatctcagctcactgaaagctctgcctcccaggttcacgccattctacggcctcagcctcccaagtagctgggactgcaggtgcccgccaccacccctggatacttttttgaatttcttttttagtagagacggggtttcaccgtgttagccaggatggtcttgatctcctgacatcgtgatccgcccccatcggcctcccgaagtgctgggattacaggcatgagccaccacacccggccttaaaaatcatattcttgaataaactgcttgcgttataattattgagccaaaagatatctgctttttacattttgcagacaatccccataagtctttttacccttgtcttatacttttaaaaaatttgttcctttataatactttaaatatatgactagacaaagcttttcttctttccttttttttataattttatttacagtttttttacatttgttctttccatgaattttagaataattttatcattttcttaaaactgcaccagaatcttaagtggaattacattatgtttgcatattataaaaatattgacacctttatgacatatcttccatcacagtggcatatgattttttattcactcacttatcaattttactaaaatcatatacattcttaacattttgatttattccctggcaattatattattgttactattataaactagcctaccccatttatcttttatttacatttcttagttaaaaggaaaactgtttctgttacaatatttgttttatctcatcactttattgacttttcttactctaatagatgttaggttgcttcttatattttgtaggtatagcattatggtagctgaaaagcagtctagtttttcattgcattagctaaaagctgcaagtaataatggtgaataaaagtagttcaatattcatctttgtcttgttgctcattgtgggtacgcttttagtatttcactctaatgtgtrttgcttactggtttcagtcaaatgctctcatttatgtttaaagtttctccctgtctctgtttgttcttttctttttctgtgtgtttaaatcaagaatggcttcyatatattatcaaacacgcttttgacactsgttcatatcatatagtgtctcatttttatcaatctactgtaagtatgctgatacatttcctaatgttttatcagccatacacttgtaaaataaatctcaatactgtctgaatttgatttgttaatatctgatttaggatttttttaatggctattctttatcttgcattattttgaaatttttaaatcatatttcctactgctgtgtagttcaaaaggagacagatcccatattagaatttaatgaagaagtggcatttgagttgaaggaaatgtagaatttttacgtttggagtttatattccaggtagagaaagcaatatgagcaagagcaagggaactgaaagtacaggaagaatggaaagtatgtcacttagactggagtgtgggatatatgtagtagccattgagaggcaaaatcggaacccatgtctctaactgaaaatgcctctatggagagttattcttaattcaataagaaatgggaagtcactaagtgattttgatatgggacttcacatttgcactttgaagcattagaattaactcactcttgagaaaaatggtgatcactatctagtaaaaatttcatagctcttgggaagtatttacagaattgcctgagatggaagcctggttttttttttctttttkgcttkgttttactccaatgcttatgtccttcatgcttggaggacttttatatttttcaagacatgagtatataatgagaaaacagactctgtacttactattgaagttaattcattttcatacaaatgaaggaaagtatagtttgaatatagaatatgtaatgaccaagaaatcagatgatgataagtgacttagaaaagttttctactgaatttccccttcctggggaatttaataccgcagccttttttatkttatatggttaactcttttctgtaattaggaaagcacacaggtaatagattgagcagcactccgaatgaaggctgrcagtgaaactgaattacttatacctccaaagagggatacctgccattaaacatattgtttaattttctgttatataatacttttttccttaggaaacaacatgtaattatatgtatagttattggatgccatgaatctcaactatgataatagaaaatcagatgtttattgctccaattaaaaagtgggttttagaaacaacactatagagagacttgatttccctgactcctgacattgacatatttgaacaagaattaataagccacataatcttccatttaatttatatttatgatgaagtcatatgtattactctttgttagtgtttgcctaatgacctttttaaaaattatttggtgtgagatacaaattctgaacaaaagagaaatatacagtcatacctcagagatactgcaggtttgatccagacctctgcaataaagcaaatgtcacaaagtgagtcatatgaattttttggtttcctagtacatgtaaaatttataaatataattttgctgtatgtttatatagtaaattatactgtagtctaagtatgtagactacattatgtaatgtacattatgtagactacattatgtaatgtacattatgtaatgcttacattatgtaatgtacattatgtaatgcttacattatgtaatgtacattatgtaatgcttacattatgtaatgtacattatgtaatgcttacataatgtaagcattatgtctagaaaagcaatgtacatatctttttttaaaatattgctaaaaattttaacaatcatctgagcccttagcaagttgtagtctttttggtagtcaagggtcttgccttgatgtttatgacaactgaatgatcagggtgatggttgcagaaggttgggttacctgtggcagtttcctaaaataaaacgaacgtaaactttgccacacccattgactctttttttcacaaaagatttgtctgcagcatgcaatgctgcttgttagcattttwtccacagtagaacttctttcaaaattgaagtcagtcctccctctcaaatactgtcactgctttaacaactatgtttatggagtattttgaatcttttgttgtcatttcaacaatgttcacagcatcttcaccaagcatagatcgcatctcaagaaactactctttgctgctcatccataagaagcaactcttcatctgttcaagttttagcatgagattgcagcaattcagtcacatgttcaggctgcacctctaattctagtttttttgctatttccgtgacttctgcatttacttcctccactgaagtcttttttgttgttgttgagatggagtctccttctgttgcccaggctggagtgcagtggcatgatcttggcttactgcaacctctgcctcctgggttcaagcaagtctcctgcctcagcctcccgagtagctgagattacaggcgtatgccactgcgcccacctaatttttgtatttttagtagagacagggtttcgccatgttagccaggctggccttgaactcctgacttcgggtgatccacccacctcggcctcccaaagtgctgggattacaggcactgaagtcgtcagcccctcaaagttagccaagaaagttagaatcaacttcttccaaactcctgttaatcttgctattttgaccttcccccatgaagctcaaatgttcttaatgacatctagaatgatgaatcctttccagaagcttttcaatttattttgcccagmtccattacaggaatcactgtctatggaagctatgatctcacaaaatgtgtttcttaaataataagacttgaaagtcgaaatgacttcttgatttttgggcagtagaatggatgttgtgttagcaggaatgtaaatggcattcaacttctgcatctccatcggagctcttggatgatcaggtacattgtctatgagcagtaatattttgaaatcttcttttctgaacagtgggtctcaacagtgggcttaaatattcataaaccatgctctaaacagatgtgatgtcattcaggctttgttcttccgtttatagagcacaggcaatgtagatgtagcgtaattcttaagggccctaggacttctgaaatgacgaatgagcagtggcttcaacttaaagtcactgcctacgttagacccttaccaagagagtcagtctatggttgtgagagtcttagatggtgtcttattctaaaacaaggctgtttcatctgcactgaaactttgtggtgtagtatagtcacctgcatcaataacttgttgcagtttctacatcagtacttgttgctttgctttgtgcttttatgttatggaaatgacttctgtccttaaatctcatgaacaaacctcttttaacttccaacttttcttttgcagtttcctcacctttctcagcttttatagaaatggagagaattagggccttgctctggattgggctttcacccatgggaatgttgtggctagtttgatctacccagaccaccaaaacttctatatcagcaataagggtgtttacctttcttttcatttgtggttccctggaatggcatttttaatatccttcaagaacttttcctttgcattcgtaccttggctgctcagtatgagagacttagctttcaacctatcttggcttttcctgtgccttcttcactaagcttaatcatttctagcttttgatttaaagtgagagacatgcatcttttccttttacttgaacacttattgtgcactgtaggtttattaattggcctcattgcagtattactgtgtcttggaatagggaagccctaggagagggagagagacagggaaayggctggttgttggattagtcagaacacattcaacattaattgattaagtgtgccatcctatatgggtatgctttgtggcacccctggttacaatagtaacatcaaagatcactgatcacagatcaccataacagataaaataataatgaaaaagtttgaaatattatgtgaataactacagtgtgacacaaagacatggagtgaatgcatgctgttggaaaaatgatgccmatagactgcttgggtgcagggttgctacaaaccttcattctgtwaaaaaaaaaaaaaaatgcaatgtgtgcaaggtacaataaaatgagttatgcctatagtattaaataaggaaatatgggttgctggcaggtggtctctgtcctcctggtttacaaaatagtggaaaaaccaagagtaagttattacaggtgctatagttgttacaaataggaaagtgtggaccatcaaatatttacaggagacttaacctggtttgtgagcttaaagaggagactgaagttgagttggtagtcccaaagtctcagaattttctgattatgagtttcaagtgtctaacagggtgaatgacaattagaattggaagataatacgtacatttaaaaattttttgagctttgcaattttcttcactttttagttatttttaaaagtaaaattttaaaaagtacatacttgtgaagaggacaagtatgtcaagacaacctttatagagaaatactggaagcatttccatcctaaacattaaagagttttattattattaagggaaaactcagtaaagtgaaagctactttgttgactgacacctttttagtccaagttatctcattgattgtcacttatggaaaatttagtcttagcaatttgttttgttcaaatctcttggtagttggcaggaatagaaagcatgtctcttaatcaactgtttaaatgtctgttttacaggatctttcatttaagaagcaatccaaattctctaaaacttgagctttcaggaaaaaagaaaacagatgatttttaaagattctaaccagtagtagtcattaaacagaagtgctttgaaaacttgaaaatttggaatttcttgtgtaatattaaacatagaatgcactcttctgatccattactgaaaaaaaggatccttctataatttcttagttttatgcaaagcatcttgaatccttcccactttttttttttttttttttgaaactactacctaaaacacgtcatttactggccacttagtctgtgccggacactatactgtgactttcttttatttactaatttaaccctcatgctcttctctaaggtttatattatgatgtccattttaaagatgaaggggctgtggggcacagagaagttaagtaatttggtgacrtgccaaaagtaatacagctgaaaagtgatagataaaagtaaaatgtttacttgatatttaggaataaattatgtctgtaataattttgcattcttttcctaatattactttacttttttttgttttccaggatttgttgatgtacctattacaattggtccaggctctcaaatatgaaaattttgatgatataaagaatggattggaacctaccaagaaggatagtcagagttcagtgtcagaaaatgtgtcaaattctggaataaattctgcagaaatagataggtatggatatccagggaggacatattttctagtttgttaatttttcccttttcaaattgttttctcttttcctttccttagatgtaccaaatgctagtgttactaattttgaagttttactagtgaatattgcatgtgtactcacagcacacagattactatattagggaatagtgttttgcaagctatcaaggctgaatacctgagttaaaaatcttgactctgccacttactagctgtataaacttgcataaattacatattctctatgtgtctccggtttcttaagagtggtgatagcmatattaactcatctttaagggttgtttaatcattaagtgaattaacactcataggaaactgtctaatacatagtgcttagtaagtcttagctactattacttatttatgttaaaatgaaatagaaggagcaggtgtggtggctcatgcttgtaatcctagcactttaaaggctgaggtgtgcagatcacttgagtcagaagttcaaaaccagcctggccaacatggtgacacccgggaggtagagggtgtagcaagctgagattgcaccagtgcgctccagcctgggcgacagagcgagactccgtctcaaaaaaaaaaaaaaaaaaaaaaaagaaatggatgaaatagaaggacggagcatgctagtgagctcaaatagtttaataaaaagttgcattttttgttaactgtttacacctctttagtagttaaactgaaaataatagcatattatttgaattaaaagttagctattaacaatataaaaattaggagttcccaaatgtatatctgacactgtaccacgtgtccacacacattatcgtgttacaactgtcctctgaggtacgtattcctgtccctaatttagagatggacttcaagtaaattgcccaaacttttatgtatcttgcaaatggtagagttgactccaaatcccacattttttctactttttgcttttcagagaatcttaaaatttgcaaatagtagtaaccattgggtgaaaaatcttagccttagtgataggaaatggttttgtgaagatcattaggtttgttattgacaaaaccaggtctaaattttagacttcctgaatcagtccagtcatttaaattattacatgagctcaagattggatttttgaatttttctttatgattatggttatgctatgctttatgttgtgtgttttatttggagaagaaccgaaaaagaggaaaataatttttctttcccaggytactttatatttttctatttttaagggaagatgctctttatattttatctcactctatattggaggtcttcagtctcaagtcatgcttatttactttcttccctatgccatgtagaacgttttgtaagtaaaagtctattcagaattttatgatggggtgaaaactgtaacctagtcttttccaacttacggtctactagtcactaattttgtgtgtttcttttttagttctttttttaagctctgttatgtttttaagaagataaaagctctattttrtttttaaaaagagagaatcttggccagatatgtttgggaaatgctagtttaaagctaaatgggcttaaacaaacaaacaaacaaacaaacaaacagcacttacccaaacctttaatatgcagacttgcacataaatctcccaagaggcattacccataatctttgaccatgcgctttttccagagtacaatgtgactctagtgttgcacagaacacactttaggaagtgttgcattaactagacacaattgaagtgaactgttccataaaaaattgtgygttctcttatggacagagtattttacatctcagtgatctcttttattactttttcagctcccaaattataaccagcccccttccttcagtctcttcacctcctcctgcatcaaaaacaaaagaagttccagatggcgaaaatctggaagtgagtacaaagcttttccagcttcctataggagagatcctactgcatgaacattttatacttgtctttaaaacctcaattttgattaaataactaaatattacaactttattaaataacttactttatgatgcacgtttataacttttccccctcagcataaagtaccagatagtcctcaatttgagtcattttattggtgctttgggcatataaatggattcatatgcaatatgaaaataaactaggcttaaatattttattagggaaacctagaatatttactgtcaatgtgtttatgaaccttactgtaattgttgtcagtgcttgtgattacatcgtagaaatgtataactttgatattagagttaatacactaagcaactttttaactatacatataagtagacacatttttgagataaaacaggcctgttagactagtgctactctgaaaagtactttggaaagtgcattgcagaagctgatgtagtacatattttttaatttgtctataagacttctaatttaaaagaaatcattaatatctctgatgttgaaaacaagtaacacatgttttattattagaacagttcaagtgatttttcagtgtgtgtatatatattacttttagtcagattttaggagtaattgttaatggctgaatgaatcttttaactattagctattgattaaagtttgtatgtttgcatatctttcggtataacaaaatattcaactgaaaaaagaatttttaarttacagaatcatagaatccttagataagccctttaagaagccaatctgctacagtctaagttttccctttcagagctaagatattgattcattgattcagtcattcattcattcacatatattttttgagctcttaacatgtatgggaactgttctacatgctggggttgatgcagcagaaaacaagacagttacaatgtttgccttcatagaggttatgttctagaaagctcttacaagttacttgttactaaaaaagtaacatccctctaaaagtgaagcaggtgagagaacaaccatatggctatctggggaagagcatttcagatagagggagtagcaagtatagaggtcctaagaccagagtttaagtgtatatgtttgaagaacaccagaaactagtgtgcctggtttgtgggagagtgagcaaaagagaacctggcagaagattggatccaggagagaattggatatcagtagtgtagggcttgtaggccattagtccgaatgagttttccatattggtagcttgaacaaagggtgatttacattctagatgctgtgaagtgattggrttctgaaaacgatgttcagaatattgatttacactcccccatcactcaaaatgtttaggctaaaaatgatagtttgtatatatttctgatatttctcttgtgattgatgaacctatctgttgttattcaatgattaagccatttaactttttgtcagctgaatagttttttagagggttcaggtatccagaaaagagtggcaatcattttgagtgatatttctatcttcccctatcccttcccctattcccatagagtgtattgtacaagccattgtcacctttatgttaatacacaatcaagctgaattacctctcttcttatcacaacttgagatatcaacattcctgtctcctttttgacacctgagcagtatcttatgtccttcctcgttttattcttggagtttcaggagaacattatacgtgtctggccaaatgtttgaaaggagacagaaactcaattattccccaaatctgctcatattttatgaattccatgggtcatgagaagaagttgtatttcccagctgttgggtatagcattatacataagttactagagcaagcttattgtgttattgaaatctgtactctgtcctaacatttttttctgctttatctgtgaaagaattagggcaaaattcccctgtatgatggtagaattattaatttcttcttgtagttctgttagtgtttgctttaaatattttgaagctcttcaattaagtaaataaattgcatctttatcactgtttggtaaccctcttgatatctaataatgcttttcatcttaaaacctgttttgtctgatgttaatagagctttgtcttgattaatgttcatgtttatcttctcaatattttgttgcgtttatcttttcctttgaatttttttgtagccttatattttaggtttatgtttatatttaggtcccttgtaaatatcatgtagctaaattttgtttttaaatctagtttaacactctgttttataactggaacttttgccccatttgcttttattgtggttgtagctgtattttgactgatttcactatcttatttagtactttctatactttcttwtatatatataaattacatattcttgcttgtcattggctaaatccttctccctccaccccaccccatcttatttaacttccttcagatttgataatattattgttattattgtatacactcagtaaatatttagagatacttttcttgaaggatacctgcaccttcctcaccatttcttcttatgtctgtgacctacaatatgtgatctttttttataaagcacttttttctttaaattgttttaaaaccttaaagtattgcttacacagattgagttttaacatttacaatacatacttcctgttwcacagttttttaaattcaacttttctttatgttctgtaagtaattttttatcaaaaaggcatagtatgaaatgaaacgtgtttgctattgaaatatatacatcactgtacaaaagtataatgttcttggcagatagtcaaaagagaaactttaggcctatattctgcctattaaactcatggactcagctttatataatggcttcctgattgaggagttttttaaattggatttttggtgcatatttaaaatgtacacctaagctttaaaactggagataaaattcttactgaaagcattggcacatctactttgtaacaacaccctcttattactcggactttacttaagaaaggacccctactgtgttaaaagttctaatctgttgatccctactctttcattattcatcagctcccttcaatgtttgcttttctctgaacatagcttttatcccatggctgtcattttagttattattttattagtacctgcagttcccctggcaaaaatctcaactcttgataagcctcattaattacctactttcgctatgcctgaatattgctgaagaaaagcacatagcatagcatgttggtgtcactataaattcatgatcacaaacctcagatgagcactcactgctgtctgccatcttccatttccctagacgtgttgatcttcctgctctgcagtgatttttcataccatttccactctgttcttcatgccccgcctcccaatctctagatgacaattctgcctcatacttaatggaaacaatagaaaccactaggtaagaatggtctgtttcccatcaccggttttatagacaggaatccctaccccatactttccttctgttttcttacacagaagaaacatagctctcttcaaagatgtgttattttcttttcctgatrgaaatactcaagtatgtgttagaattttccatgttaaaaattcagaaaaacaaaactgtcccttgaaaccacatctcttgaaacagcaccttgttttcttacttctcttctcaaaggagttgtttatacatactcttttcttccttctttccagcctttagtccatatcattctggctcttgcttaaaacccaatttgctaagttacaaaatgaccttaatacttttggttgcacattcttttcagcttcttcagagtattcaacaaagtaaataactttcttcttgaaaaactaactcttctcatggtttaggtgatactgtatatctcttgtttttctcttcatctgtcttgcmatttcttctcagtttcatttgtcagcactttcctctctccttgatatcttaatgttcctcagggtcctcttctagtctcacttgatactcttgtcctaggttgtgttaataaactcaaatttgcatttctagctcagatctttcacctgagtttcagattcatctattcaaacatgtatttgatctccattgtatgtctgacaggcattttgaacttaatatttcaaaatacaactmtttcctcttactctatagataggcagctttttgtctgaaatctccgtttgtgccataacaaatcaatccagaaatttgggagttactattaatgcctttctttccttcstacttcctctccaccagcaggtcctgttaattatacttccaagatatttcttatatwtgtctccttttcaccatctccactctcattatttactctcctagtctaccgtaatagcatcttaactgatctcaggtctgtacttcacaggacaaccagtcattttcctaaaatgtaaatcacatcatctcactctcctcttaagatcctttgttgggtatccattgcttttaaaataaaatccatactcaataataatgtgaccttaaaggtctcacatactttgacctttgcctatcttttcagtctcttcagtgttcactatattttatttacattacttagcattccttgaacaagccaaacttagagctttccagtgtcattttggtcttgcctgaatgtcatgtcttcattgttgccttttctaatctcccaacctaaattatttctatgaccatttcttttaatgtctctctcctctaccaatatgaagctccaggaggacaaggagtcctctgaactgcggtattctaaccacttgcatattttctgatttaaaatatgttttatgtatgtatgtaaggatagataaatggcagaaaatctgatctattacataagatatacagatgaaaactgataggcaaatgtaaacttacttattttcccccattactagtagatgrtaatatataatacatttcttttaattctttcagcaagatctctgtaccttcttgatatcgagagcctgcaaaaactcaacactggctaattatttatactggtatgtaaaaataattttctgtttattttcttattacccttaagaattattttttctcatgctataaacacaaagatgatttaaartaagatatgagcaatcatcaaaagtctagatatagtatttatatctaactgtattccctgacagctgggttcatggaaatgcttgttggcatcaacatttctctccctttcactaaggatataactttccaggagctaggatataactggggagggtaatgggtactttcagtttaatatctgtttggcatgtaaagtagttgagtatgatatttcacagttcttcaggagtatatattttcacattatttactaaaacattggaatcatttaaaaagaaaaagttggaattaaaagttaccttatggcattttaaacatgaggaaactgaggcagaggcttgctgtagctgaacttgatagactctgatctaggattaaatcatttatctactgctttgccattttcagggtattttcagttaccttttctcatttgtttctatgacgttaaatgggcaagcataaatatctctatttcacattaaaacaatgtcctgagtcacttgaaggaaagagagaaactaaggcacggagtggctgacttcttgaggcacagttaatatgaagcgtggtgccctttatttgccccagaatcctgaagagaaaaaggcaagtagcttaagccacaatcagaaatattttgcttcaataaaaaaaaagtactgggattaaacactagataagagggcttcatctaactttacggagcaaacaaagggcagagccaggtgggtaagacctgcctacagccttctttacctttgggagaatccttwaaactacttatatcactttttaaacttcttggcatgaggstttttactgtctaaatgatttctaatctaatcttactgctcaatttatagccttaaacaaattacaaattagtagatgtccattgtaaaagctcactacaggttgagcataccaaatccaaaaatttgaaatctgaaatgctccaaaatccaaaactctatgatcattgacatgaggtgcaaaagaaatgctctttggagcatttcagattttgaatttttggatttaaggtgctaagtataatgcaaatattcaaaaatcaaaaaaaactagaaatccaaaacatttctggttctaagcattttggctaagaaatgctgaaccagtacttttgaataatgatgaggtattttgctttttgtgagaaaattatacaaaatacgattttgttttaagactgatttgggaagctgcycttgtgggtcaagtccagccttaacttcattctcccactctccagaggtaatgctctgctgggtactgcccctgtacttaagaagtaggtaactaaattggagcactctttttccttttttcttttttattgtactttaagttttagggtacatgtgcacaacgtgcaggtttgttacatatgtatacatgtgccatgttggtgtgctgcacccggtaactcatcattaacattaggtatttctcccagtgctatccctgcccccatccccaaccccatgacatcagtgtgtgatgttccccgccctgtgtccaagtgttctcattgttcaattcccacctgtgagtgagaacatgtggtgtttggttttctgtccttgcgacagtttgctcagagtgatggtttccagcttcatccatgtccctacaaaggacatgaactcatccttttttatggagcactcttttaacacacacaatttttgatttacataaacaataaatatttgtttagtttaagcctttatggttctctttacaacaaagaaaaaccactgtcaacaatcttaagtaaatcagtgattttcccccctttggaacctgtgtttatttttttttggttgtgtttgtttttttctgttggcctctgtagtgggaagaaaaagagtttcctgcttttactttagcagtttaatataatattcataaaactacattttcctcacgttaaatttcattatgtccttgaaaatataggaggttttgactaattgttaatcactattctttctttgaaaggtttacttagaaattctcatattgccaaattgctactatttcctttaaatgccaccttttacctctaatgttctctgtgttccaatctgaatatttaaggatatgtcttgtcgccggtcttatggaaaaatatttcctcatgaaaatctaaatatttagaaggaagtaaagagaaaaaatatttgtggggtatgtttctaagtttttgagtaaatatttcaaagcttcttaggtatttttaaattaaaattttgtatatttttaaaaccatttgctaagaattcatttagagatatttttgtttccttgcaatattcacagaaacttttctctggctcagaatttatagtctagagtattcactatggtaagagctatatgtgtatatactgattatgtggtgctttcaagttacatattctttgtgtttgattgaagactagatttcattattaaatttgaaatgagttttgatagaatctttgatctcttatttcaagtaggcagaattttctgaaagcagccaaacagtaggaaatctgttcgatgaagtttccaacatagcagctgcttctgttcataaggagcacacttttttttcctataagcaaagtacagccccagttcccagtcttataaacattcaatcaaacttagatttgatttgtgttttcccactatatctctgattcattgaatcaatagcatatgctgtgtctattcattccctaaggagtaattgtttttcccatatttacagtctgcctattacatattcagaaatactcatggggagaaaagctattgatgtgtggactcttgcctttaataaacactgcttttgtgaatgtaaggtaacaataagggaaataatttcaaatagttggtttaaaatgatcattcttctcttcctttgagcatataaaaataataaaatgtgagaatttaaatgcttctctaagcctactctattataacaaatgtattaaaatagaaattttaattgtgctgtttcctttgaacayttgaatttccttttttcatttgttccctttctggtgatttaaacaggattcttgctgtagctaaatccttaggggcctatagttgtgcagacaatccttttaaaatgaatagtgtcaaccttttaagccacagaggggcgttacagtctccagtttgtaaaatgatgggcatcagaatctataaattgttgcagttttttatttttatagtcattctagggtgttgaaattgaaagtaaactttggctgctttgacatgttttctataacttttaagacctttcaaggtaataaaggttatttatgccacaaaataaaattgccaggaaacaggtagcccactgatgtcatcttacaatgggtacctggacaattttgtttgcattcctactttaagatgacagctttcaaagaaataccttagagtgctttagaatctagtttattgatgtgaacagaaacctcagaaatgattcaaatctaggtcttctagtcttgatagctaaccttgtctctcatatttggagatgacagtgtcacttttctttttttaggtggcctttttgtttgaawagawgtttggcttgaatgatttttttttttttggagatgaagtttcattcttgttgcccaggctggagtgcaatggtgcgatcttggctcactgcaacctctgcctcccaggttcaatcaattctcctgcctcagcctcccacatagctgggattacaggcatgtgccaccaagcccggctaattttgtatttttagtagaggcgaggtttctccatgttggtcagcctagtcttgaactcccaacctcaagtgattcacccgcctcggcctcccaaagtgttgggattgcaggtgtgaaccaccacacctggcagacttgaatgatttttgagaggtgtttgatacttgatgcttattatgagcatcaacatattttttttcttttttttttcttttttttgagatggagtcttgctctgtagcccaggctggagtgcagtggtgccatctcggctcactgcaagctctgcctcacgagttcacgccattcttctgcctcagcctcccgagcagctgggactacaggcacccgccactgtgccyggctaatttttttgtattttttttagtatagtagagacggggtttcaccgtgttagccaggatggtctcgatctcctgacctcatgatccgcccaccttggcctcccaaagtgctgggattacaggcrtgagccaccrcgcccggccaacatatattttcaataacaggaaatggctgcagccatagtgtttacttggtggtcagaaagagcaagatacagcagtgagcccctacattgtggtcagctatatgttcatttggaaataagtttgctgcataaacacaggaaaagctgaataccctaagatgacggagataatcaaggactttaacaatgaagggtagaaggggatggcttggatttgaataataccatattgacagtttcaccatttagaactgctgttttttgttttaatgttcggctttagattcatggaccacaaattgaactgagtgccaaggaaagtttgaggtagtgctrtgttctctggtttggctgcagccccacttctctgtctttccttctatttaagtgattcaaacatttgtttcctgcctgccttttgagaaaatttggagtttgtgaaccctgctacatgagaattcctagcccaaataccttggatattgttagtaccttcgatagaggtagaaaaaattcaatttaatgtgataagtttggttttacatgtgytcagttagaaatgacaaacagtgtcttgaaaaggggatctggtccttgaaaattagagtgcatgaatgtgaaagcaggtcatgtaatggaattcaagattagaccttagatgtaaaaaatgaatatgtatttatatttgaaaattatcaataatgagatagtagctaaatccacaagagtggaattattcattcaacagtaatgtattawtaatatgttgagcatctattatgagctagacatggacgtgctgaagatatagtggagaacaagacaggtaagccctcagctctcatgaagttgaccatctgaatggctgaatacagagtatactctcccagaaatagtggaaagcataataataagcatccgtgacttgagatttgggaaacattgtcagttaagaaggtcgaaaagtttcacatgtgttttaaagataaaacagtgtgaaagtcaacttagtaaaatcaaaaaagtctgacctgggagcccaaagtcctgggtttcaatctcagttttacaatcagtcataccaccatagacaagacacagcccctctaagtttcactattgatgaagcaagcaagttgattgagattgatggttttcaaactacacatcatcatgatccactgaaagtaatttaaagtttcacagtctagcatttgtatttaaagaaaaatgaaataaacagaatagcaaatattaacatattgytcacaggatgttgctttgtgaaacttttccgttttatacatctgtgtgcatatgtggctgtgtgtatcaagctgtgatacttttttttttctctttgagagatatcatctccctttgttgcccaagctggagtgcaatggtatgatcatagcttactgcagcttcacctgggctcaagctatcttcccacctcagcctccttagtagctgggactatagtcggcgacaccacacttggcttatatttaatttttttttaaatgtagaggctggtctcaaactcctgacctcaagtgatcctccttcctaggcctcccaaaacactgggattataggtgtgagccaccatgcccaacctgttatttgctttggtttgttcccagtggaacatttagaaacactggattagaagacctataaagtcttattcagatcattgcttatatgatttttgtaattgtataagcagatgagggttaagaagacatttaaaatgtcttttactctttaaaaccatagttttttaattggaaagttaaagattatgtatggatctttgaaaaacgggaaactggatgggaaaggaaaaattacttaaaattttattcatcttttgaaaatataagtgacaagaatagcttcagagaggttttcagaataagagagtcttatgtaataccaaagtattacacagattatgaaaataatagtttttgttctcgagttactcagtaaatatgtgagcttagatgatttctgaggatgttaatactctacctcataaataggagaaaatgcttgttttggtggcaaaagttttagaaaatttgggatattacacaaattaaggcattaccactcttagtttaccttttattgatggttgtatgtgttcctctttaasttttcacttttaaaagtgatgataaaatgtgttttattactccaattttattatttttgcatatgtaaattawtctgttttagtgaaatgatatgagtatttacaaactgaatctaagtttcatttcacatcacatgaatggctcaaactatttttaaggtatgtgatagtggaatgtgaagatcaagatactcagcagagagatccaaagacccatgagatgtacttgaacgtaatgagaagattcagccaagcattgttgaaggtaacccttaaatgtgagggttggcaaactgcagcacatgggccaaattcagcctgttgcctgtttaggaacatcccatgagctaaaaatggttttatatatttatttttatttttatttttttgagatggaggcttgctctgttacccaggccggagtacagtggtgccatctcagctcactgcagcctctgcctcctgggttcaagagattctcctgcctcagcctcccgaatagctgagattaaaggcgcccgctaccatgcccagctaatttttgtatttttagtagagacggggttttgccatgttgggccaggctattctggaactcctgacctcaggtgatgcacctgcctcggcctcccaaagtgctggcattacaggcgtgagccactatacctggcctggtttagcggttgaaaagaaatcaaaagaagaagaagaatttgtgatacatgaaaattatgtgaattcaaattttagtgttcataaatttattggaatagaatcatactcatttgtttttatattgtctatggatacttttgtactcaataggagtttaatagttggaatgaaaactgcatggccaagaagacctaaaatatttactctttgaccctttacagaagttttcttgatccctaatttaatgaaataaacctgtgcatggaattaaaaaaaagctttgcttttttattttcctttctattgtgtatctttcttatcaaggctatgtacatttccagaaatctggcaatggtcatattgcagattctttttatataatgtatttttgccttttcaacagcttttaaaagagatttatttttcctgtgttcgattcttaaagcagtgtcacagtttagccagcagagggtgcaagggcagcgaaaagaaagctaccacacattaatctgtggcttgccgcagaaatagtctatttcatggcatctttcatctgtttgatgtttcatgcttttaaaaatttaaatcacatcttattaaacactttgagactaagcttttgtattcgttcccaaagcttctcaacatcaaactgattggcaaataagcctttggtcctctcctctaatctcgtttctgttacagcctttgtcacccttgaagacatttcagtttctttaagtttaaattgcctcatctttgaaatgaggttgataacatttacccagcttcccttaccagggtaattgggaagattaaattagaaatgtattttataatattttatgaactaggaatcactacataggaccgtatagcatttagtttttatgacttatattttaagcacatattgtggtgctatttgaagttttctttttttaaaagttgatttttagttccttgaagatctatatctttgtttctgccatatacatgtatatatgtctagcacatttctgcatcataagccatcggatatttattgaatcaaataayragtgaatgtattttaggatgaatgaattctatcttgtcacatggtttatgtgggaaaaaaatgcggttgtagatagaccagtatttgctgaagactcagataattttcgattgtggatggattagtggtgtttaactaagataagaggtttcttgttatttttgaatcaagataatctttttcagttttgctttctatttaagtttataactgtgagaaatatgaataaggattatccatgctgttaaagaaatccagatcattacgcaacatagaactaattttttctcactttgaacccttcagggtgataagtctgtcagagttatgcgttctttgctggctgcacaacagacatttgtagatcggttggtgcatctaatgaaggcagtacaacgcgaaagtggaaatcgtaagaaaaaggtaagcctatggtgtatgcttttgttcctaatagcatcttggcatcagaaaatactgaattttcactattgtctttttgggttgatacgtgaattttttttttttttttttttttttttttgacaatgtctcactctgtcgcccaggttggagtgcagtggcacgatctcggctcactgcaacccccacttcctgggttcaatcaattctcatgccccagcctcccgagtagctaggattacaggtgcccgccaccatgcccagctaatttttctatttttagtagagatgaggtttcaccatgttggtcaggctggtctcaaactcctgaccgtaggtgatccacccgcctcaacctcccaaagtgctgggattacaggtgtgagccactgcgcccggcctattgtgtgaacttcttaccatgaaattatagtaataggaatgttttatgagtttatatatatattgatatgatatttaatcttcataacaaccctataagttaggacctaatattatcccaattgtgaggagaagaaagtaaagagaggtcaagtaatttgtttaatgtcatacagctagtaaatattggagtggggatttgtactcagacattcttagtccatattgttatccacagtgctttaccacctctcattttagaatcttagcaaattagaatatacaatatatttgatatggaaagaatctctagagatcatttagactagaattcttctgagaaaacaaaagtccagattgacttgcccaaggtttcacaactggttgttagtaagtagctttgtaactgttctctcctggctagttcatcagtctgtctctcaactatgaggtttccacttgatgggtagaagtgaatgagtagatgagttcttcacgtgacattttttctgatcagtagcctaaatgatatgaaagattcgcttggtatcttttcctaattccattagataattggcaggcctttcttggtgacctttgtaaaacaacacattttagtgttcctttgacttttaaaggacagcagaaagaggaggaaaatatgaagatttgagtcagtggttcaaaagcaaagaatcaggtctaaagagaaatgctagcagagccatgcagaagaagtaatgagtaacrttcagcaggttagagaggggaaaacaggctgagaggaaacacggttctgttgagttgacattttctttgttgttgagaagaatcacaaaccttggtcaaataaatatatttctactactgttccccctgtagcacctctccccagaggtggctgtgtgggaaacagtgtgattcccagatgcccaccagcagagggagtgtctgctgctctgacctgcagtttggggcttatatttgaaagcagtttgttttagtgccaggagctcttcaatttagcaggcacaggaaccttggcaacacctcagttttagctcttctggaggctgaccacctatttgagacatcactcagagtctccccaaataaattttgtgtttctcacatagcctatattttaagccagaccatcccaagtatagtttcagtattggctaaaaatctttataggcattttatcatgatatggtaaaagacaaacaattttatttacatatatttactagaaacaagccctggcaccatgaagaaatgcagagatagcgctctactaccattattggcattaatactagtaatattgaaatggccactaatcatataaaatcawatgtagcactttttcatccctcataatttatttgcgagagctatatcacagtgggtataacagtgttagatctgtggcagagtaatccctgagttaagtgtcaaatgagtaaagaagatgataatgttgtcttctttccttcgttgatctctagtttaggaaaaattatgttagaagaggtcagtctacatatttgaattctaataaaatgcctttttcatctactttttttttgagacatagtcttgctccgtcgtccaggctgcagtaccatggtactgtggcatgatctcagctcactgcagcttctgcctcccgtcttcaagcaattaacctgcctcagcctcccaggcagctgggactgcaggcgtgcaccaccacgcctggctaatttttagtaaagatgggggggtttcactctgttggccaggctgatctcaaactgacctcaagtgatctgccagcctcggccttccaaagtgctgggattacaggcatgagccactgtgcctggccatcttttccatctatatttaaaataaattaacactttcactgttaatattataagcagtctcttttcactttatgattttttaggggatattactcatttatgtgttctacaaatacgaaatatgtattgcatgcctactctgtgcagagtgcttttctaggttcttgggatacagcagtgaatataaaaatctcttcctctatggggatcatattctcgttgaagagagtaaatgcaataaataaataaaatgtatatagtgtgctagatagtgttatatgttatggagaaaaataaaacaggaagggggattaggcagtacttgtgtccagtagtaaggcagtgtttcacttcttaatagagtggccaggtaaggcctcactgagaaattgacatttgaacaaaggcctgaagcatgtaagagagcaagccggtcttctggagaagattgttccagccagaggaatagcagtgcacagccccggaggtgggagcatgtgtggcagttgtgagaaataggaagaagcccagtgtatttggagcagagggaatgggtacagtaataggagatgaagttagagataattgggaaatggatggaatttatccttgtaaatcattatagtcaatattattttgactgaaacactgagtaagagtagaagctattggagattttgaatagcagggtaacatgaactgactttgattttagcagctgcactctggttacttttgataagaaactgtaggagggtgaaaagtttgaagaagagaagcaatcaggaggctattgcagtaatcaagatgagaaatcatggtggctgggttcttagggcttatagtggtagaggtggtaagaagtggctagatttctctccccattcttattttactttctggttattttatttatttatttatttatttatttatttatttatttattttaattagcgcatcaactagtaatttgttaaggtaggataactttactctcaaattagttgacattacttcacattagtagatctgaccrtccatttagttaaggagtagatttagtgatttttgtaacacttatgtagaaattcataccagttgattttcagttgattttaacttgaacttttcatcattcaggaggagatgggattattactgaaggaaaataattttacatcttctttgtccttgaaacatactatttttttctgaacttctttcactgattccagagttctctcctttgaggcttacccagcagcacaaagcacttcaacttcccagtagcattgtagttgaagtgttttatgctgctgggattgtcatgtcgagttttccttcttaaagaacaaactcacctatttaggtgagcaagccctgctcctaaagattgcaggactctcccagcttttaaaggaaattaattgttcttttgaaattgaatagaaggggttcttctaaatagtatagatgttgcttattgatgaagctgtttcatcatgacttggatttctcagtttctggaatgttagcttaatgcattatgtatatgagctgaagaaaatgaatgatgatgatatcctaggaaaagtttgaccatacagactcagtgaaagttagaaagtagggttatagtttctccaagtgaattaagtttcctttttaaactcaaaaaatgcactggggcagcatagtgaaatttttgcttaatatttggtcatgcaaaattaaactttgaaggaaatttcagtttctctctgtggcttcacaaatccttggaaacagaaattgaatctttaggtccaacttgaataaattcctgattctttgtcagctttagcaagtgaaatgtattctgtatccttcctgtgaaaagtccaactttcacagtcaagcgattgtttggtttaaagcatgctgctgctgttgttagggattatttataagtgcttgtctctcacatacaacaccatctcctttatattattttggtgctttgcaaatacttttaagttaatggaatcaatttttatgtctttactatatgttttataaactactcttctattttaacctcattaatcctttctgatttgttctagaatgagagactacaggcattgcttggagataatgaaaagatgaatttgtcagatgtggaacttatcccgttgcctttagaaccccaagtgaaaattagaggaataattccggaaacagctacactgtttaaagtaattgtgatggatatttaatgtgtatgattggaacctaattcttaagctagatcagagatactaccttggaaaactattacattgcagagatcacatctataattctagttgatttagtaaatgctagattgaagggtaccttttatttatcagtgtgttttgatttaagatcttcttttgttaccrgtacatgggcatttttatgtaacatgtgaaatacttttatatctctgggttgttttttaatatttaatttttttattgttttatttttgtagagatgggtcctcactttgttatccaggctggtctcatactcctggcttcaagcagtcttcccacctcagcctcccaaagtgttgggattacaggcatgcgccaccatacccaacataatatttagtttttcaagctaattgttaatcagagctgtaactatttttctttatgtaaatttttttagagggcarattgcaaacgtatcatgcattcattcagttcattagttcagatggttagatatgagtcccagttgacctttttaacatttctcagtctgatatctgttcctgttgaaccttaagtgttttcttatattttcacgtggcaattctctttagtccttagtagcataccaggcttggtgttttttctattgactggccaccagttcaggtagaaacagctgatgcagcagccttctctaatcatgctcaaaggaccaaaggccagagcatcattatctgtcagcatcatactgaaagatctttgtgagacatggtgctttatgttttgtgattctagtggtagaaaggcatagttgcattgaatattactttgcatgagttaagaaagggctcatagaacaacaactaatgtatatacacgggtgtaattatagtaggaaacagttcatattttttaaaaaagtgtgtttcaaggcaacctcatatttggtcatgggttgcagcccagctcatatgactaaaacataagtttcataaagcaatccctaactttaactgggtgttatggatggatagttaccattatttttaacattattctgttgctttaatttttaaatgttgcttacaacctattggttttaaaactctctaacagattacaacctgcaagttaaaaatactggtattactatatgcaatttgaaaatactggtataggagatacagtgcaattttttttttagtctgtgcttgcagtctactggagactgaaatgtaaaaagctatgcacaaggtaatatacatataacaactggcattcctttgggctagaactcccaaagaagaccagcttctaatattcttgaacactaaggactcatcaagagcagtgaattaaaaaagtaattttaccattttttttccaaccatggtgcaaaagagtatctaagacatacagcaggggttttaagagtggactataagaagatatatctccctctattggtaggtggattctagactcatactcaattataaaaaattataattatgtcttatgaaataaaatatgggaaatctttttgacctcagtattcagtcttgattatttttctttcaactcttaagtatatgggcattcttaaaaattttgagttagagtttaggaataatggttctgaggcagttgctacgtaatattagttatatagagtgtctctgtgtagggagttgctactttggctcatggatgtctttgagaatctgatgaaagtgatggattatgcacttcagaaaattgcccgtatgcttacacatacactgaaatttctgcatacacttgcagaggatctgtggactcctgttttccttgtatgagctccttagagctgaaaaggctagggacccttatttctagtagttttaaaagtaattttrtagaccttaatgtaacagccaaagctggatattcatgaagactggaccccttaaggcactgggataagtgcatgttatcctgtggttgttttcttgctttaaatttcagatgaaatctaaattagatgaaatcgtattgaatctcaaaaaagaaatcacaacaaagattctcctgcctgtcatttatctttaggaagataacttccaattactagggctcaaggtaatttataaaataacattttcaaataaaaggatattccaaatttaaggtaatttaaaattcagaattttattccaactagagtttgtaagttttaaacatacattctctgaaccattttccatgtttttgttttcccccagcattttataggaaagttttcaagcatacagcaaagttgaaggagttttacagtagacaaccgtgtatctaccactttaattctgtcatcaacattttgccatttgttttgtcacatctgttcatccatctatatgatgttttttgggccattatttctcttggttattaccattttttttgtttttgtttttaaatttctttgactcatttttttttcttkggattaatatatttctccaaatttttgtcttatataatttcttytcaatgaccaaactcaatagggtctctctctctcagaacaattttctgaccatttatgtccagaatatccatcttagcatgccactttatgtgaggttttatgattccccctttctaaaaagaatataatttctttattttttttttgttgatttaaacatatacctaaactaatttagaccttcatataattaagggaaggactgtggggaaaacataatattattccagaataaaagatacagatatttgagatctcctctcattttataaatgaggaatttgagtcttaaagctgcacaactagtacagattgagcatctctaatccaaaaatccaaaatctaaaatgctccaaaatctgaaactttttgagtgctgacatgatgccgcaagtggaaaatcctccagctgactttatgtcatgcattacagtcaaaacacggtcagaactttgtttcatgcacaaaattactaaaaatattgtgtaaaattactttcagtttatgtgtgtagggtatatgtgaaacataattgaatttcaagtttaaacttgggtcacagccctaaaatattttattatgtatatgcaaatattccaaaatccggggaagtccaaaatcccaaacatttgcaagcatttctgttatgggatactcaacctgtagtatacttgccattaaaaaccagggctcttcactttgcatctggtacattgttatgttgtactgtttcaccttatttatttcagtatacctctaaaaataaaaaatgatgatagatatataaagaatgtcttctttgtattaggcatggtgccagactattgacctgtatagtttctgattgccttagcaactctgcagaagagatggtatcttattttacagatgaggaaacaagttaaaggatatgcataagactgtccagcgagtacctgggagagcttggaatgttttaaccacatgactsattgcagagcttgtgcgctttccatcgtgtagtcttctgactactagctagttcactgttctttccagtataccctaatgtatctcattgaaaacccaacttgttttttaggtcctatttacctgtgtatttatcttatatatcaacattttcttgtatgtatagtacaattttatgcattaattcatggccaaatttgaaatcaatatttttattttccagagtgcccttatgcctgcacagttgttttttaagacggaagatggaggcaaatatccagttatatttaagcatggagatgatttacgtcaagatcaacttattcttcaaatcatttcactcatggacaaggtgaacatgaccttatgttggtggggaacatttttttcgttttggaatactgtggcttagttcatttgctgtttatggaacagaagtatttgtaacattcaggtacgatcctagaaagctcaacagtctccacttgaccktgaaaaaatttagttgcttttatatacttcagaatggtttttgtgttgagtataaattggaactgtatgtgttccattaattttttttccaaattaagttctctaaataagggatttagtagtttccttcctcttagtctattaaattttttttaaatccttttaatcccatctctgtccctggcattaaaaagtacatgcttgccctagttccctttttctgagctctaaagtactttatggccagaaaggactgcatgaagtgatagcaacaaccctattgttcattgaaaacagctgacagagatttagagtagatgaaaaatttagcataccgtcatctaagtccttaatcaatttaattttgatgatcaaagttaaattaactatttttttttttgagatggagttttgctttttgcacaggctaaaatgaagtggcgcgatcttggctcactgcaacctctgccccctgggttcaagcaattctcctgcctcagcctcccgagtagttgggactacaggcatgcaccaccacgcccagctaattttttgtattttttagtagagacagggtttcaccatgttgaccaggctgatcttgaactcctgacctcaggtgatccacccgcctcggcctcccaaagtgctgggattacagtggggaaccactgtgcccagcctaagttaactaatttaaacttaatttagcttaacttcctaaatctttattacattaaactgctatactatttgcccacaaaactgtcttttaacagtctttacatttggttaatatattttaccttttgattaaaagctgttacggaaagaaaatctggacttgaaattgacaccttataaggtgttagccaccagtacaaaacatggtaagtgtattttacatcattattatttactttagtgtacattgtgtgtactttttcaaattgaaaatttttaagtatgttagagatacaaataaattccatttgtagcactgaagacaagttggaccttcctgcctgcttcccttctgtctttccttctttcctgtttctcagtaactactgattaatgtaactactggttaatgtagttactgagaaacaggatatttcagacattcctgacaatcctgtagacacacatacacatacacacacaccctcacacacacaaaccatttaagtcttttcgagatgaataatccctgggagtttggtagaagattccctaggaatgcttgcctaatgcttactgtaaattccatagtcttgctgcccttcctgctttatactagtagttactgagaaacaaaatacatgctttaggttcctatccttcctctggctactcccaaatctttttgatgccttaattactcttctcagtttcttctcagaatgatattttaaaaagtgcaaatgtgcatctttacaatcctgcaaaaagtcatttgttagctttcattttctctttggacaaagacccaaaaaacctttacctagcttctaagtgcttgcatagtgtgacacaccctgtgtctatctttcaagcctcttctttttgccactcttcccctgcatcctgggctttagccatactggctaccttctgttttatctaatgcattgtgctctaaggccttcacatacactgtgatcattgtctcaaacattctttgctccatggcctattaattttattatccttgaaaacatggctcaaatgtcagatgtccttcgatcsctactgtaagttaggtctccttacactacttcctttcatagtaccctttattcatagtatttacccaagtgaagcttataagctttaagatccatgtaggcagtgtcaaacatctatttttacttacttggcaaatttcttccgacatggtcaagaaacaataaatacctgttaagtgaattagtgccaactattctgtatttatgatgcaagaataaatgagatatttcttattctacaggggtatataatctcctaatgtgcatgcaaattattatcctataggcttaccagaaccagatcatgatagtttatgatcctgaaatgttgtttgcttcatccaacttttttttttaatatatccatkgttttatgtttctgttgtcttcagacttatcagactgactttttctccttcttccacatactgtctgtcccctttccttttttttttttttttttggtagtttaagggatttacacatctgttattaccmggaaatgacagaagatggaatattagacmaaaggagccattacataacagttttacatacagcttttagggttaggtaattgtaatccacaattctagatttcttacggtgattttaaatttggaatattttaattggtatatgttgtaaatctatagaaagaagaaatttttgatgctagatttaagaagcttagtctatwagttttcgtttctcatattttataatagaaattagcctagagaaacatacagactaaatcagcttaatttaaaaaaaaaaagttttcttacaggtcctatgacataaatgccagtacaaacttaatgtagtgtacactgatctttttaagttgttcagatatggaatgcatttattcagagatgaggattattcttagcagaacctttatttttatttcttaaccagtagctatgcttaatgcagtgcatacatttctgtgtaggcttcatgcagtttatccagtcagttcctgtggctgaagttcttgatacagagggaagcattcaggtatggtatcaataaasattatgcaattcatgaatatattcttgtcataaaaaattcagtctttataayatagagttaaaaatgaaagtctccttttaycatttttctttcttcaagttttttttcttcctttattcagaagtaagcatgttcgcagttgaagattcttccatttgttacatagattctcagttccttgaacagtgcattgcatatcaagggatcaggcattaattggtgaacayagcctggccaacatggtgaaacctgtctctgctaaactcacaaaaatcagccgggcatggtggcatgcacctgtagtcccagctacttgggaggctgagccaggagaatcgcttgaacccgcgaggtggagactgcagtgagctgagatcacatcattgcactccggcctgggtgacagagcaagattctgtgtcaaaaaaaaacaaaaaaaaccccaaaaaaacagagttaattggtgaacaaattaaaatttgttaacgtttatttatacttgcattatattccaaagtatggaaatgttgtaatttatttgatattaattgatgagcactttatttccagtttttgttattcagaacactgctacaatgatattgttgctcatctgtcttttgtacaattatttaagaccccctatcctctcccttcaacctattgctcccctttaaatatgagaaaaggtgagtggttctgtgacaaagtaatgtatatgtttggattttttttttttttaccctttaaatacatggattagttcttataacatgttaatggtttatttttgttatttttaaaatataattttcctgcttccctttgtaaaaaaaaaaaaaaagrtatgtaattaaaacaaaaatggatacacctgagatgaaagataatacacagaagggcttggtagatgatgtttgatacagtgtgtttttgcctttccctatttaattgttccatttattcagtatgggagtcagatttgtagaaaagtattactctgattcttttgcaaagcaagtgcttattctgttctttgatttggggtacagtcatgtgcagtggttaaaagctcaggcttaggacatcaaactgcctgggattgaattccacctgtgtaactttccagctctgtaaccttgagtgaactggttaactctttttgcagagaaaagttaacatagtagccctaaggttgcaatctttggaaaggcctgcttgccaggagattggtcattggctttcagcatgttccctttgcttcctaattgataagggtggttcgctgtgcctagattgtttgttcaaataatatgctttatactaaacaatccactttccttctgggagtctggaattttgtacttgcttgacagaggttgcctgggtcaccagttcctgataaaaccttgggttctaagtctctaatgggctttccttgtcagaaacattacacccatgttactgctttttattttttatttttggctattggaaaagaagctcactgtgtcttcataggacagagagggctaggatgcctatgtatgaatttctccagattttttctgtgtatgttttccatgttgattctactgtgtatccgttctctgtaacaaaccttagtcatggtacaactacatgtttagtctgtaagaccttctagcaagtcaaacctgtcagtggtcctggggacccgtttaacatacccttcaagacaccagtttttgcatctgtaaaatttcggtaataacccatattactccaggattgttttgaagaggacctgaagtgtacttaaagtttttaacatgggccctaattgccatcattgtttcataaagtttttcattacttacattgttttgtgtaattacgattttataaaatgaaaacagtgamagtttgtatactgattcttggctgcacatctgatctgtgtaagtgatttacctgggtcatagatcacattcagctttacttgataatgaaaagttgtttttcgataattaaaagttgttttccaaaacagtaacacttcttgtgtttctccttgctacatgtctgccaaatcgtagtgttgccaaacttcaaactcttcgtacctctttttggtttgcatttccctgattatctgtaaggttgaatgtataaaaatatatgtataggccatttgtttcttctgtgaagtgcatgttcacatcttcctgtggcccatgttcctgtcgcgttgtttgtattttttgtattgatttataggagtttttaaatatatattccagatgcaaatcctttgtcagaaatacagggtattcaaaaaaggtgaaaacataggataaactttttttttttttttgtgagacggagtcttgctctgtcgccaggctggagtgcagtggtgcgatctcggctcactgcaacctgtacctcccaggttcaagcaattctcctgcctcagcctcccgagcagctgggactacaggtgcctgccaccacgctaatttttgtattttagtagagactgggtttcaccatgttgaccaggatgttcttgatctcttgacctcatgatctgcccacctcggcctcccaaagtgctggaattacaggtgtgagccaccacatctggccaggataaactcattttttaatagtacgttaatcgtattttcagataatatgctctgtggttttgtttgtttgtttgttttttgttttgcctctaaatgtaaaagaataggtgcaattggaaatctggggtgggtggtgggggacattaaacacagtttcccctaatggaaactctagtgtatttatcgcactcttacaattcttttgttcagtcagcatctctcatactgtattttgattaagctttatgctagacacttgctggtcactatttatagtttcaaaacacctagtttgtttgtttgtacttaattctaaaacatgtaaataatgtcttttcagaacttttttagaaaatatgcaccaagtgagaatgggccaaatgggattagtgctgaggtcatggacacttacgttaaaagctgtggtaagtttttcaggctattactttccattgatcagataaagaagagcaggccatcctgatattgccataatcatatacatttagaacatgttaatatttaaatgctctataggaagagtaaaagataaatgttgattaaagtagtcattgatgctttgacrtaatagtattaacaaggtgtaaattctatttagtctttcatggatatatctttgtaatcactgaactattttataatcacagtttatctcttcctggaagctgttaattttccattagattttctctatttttgaataacagaaactaagtagaccatgggaaaagtttcaatcagaaatgattgtgctttagataaagtttaagagctaagataatggtgcttcattaagagggtgcccttgtggtattttagagtcagtccttatggtccattcctagaaataagaaagcagtagtagtatttcctagaaataaatagtaagtgacatagggattaatttttattcttcaggcatttatgtctaacttcacgaaggttatattctacaggattttttttttcattttctttatttttttcttttcttttcttttccttttttcctggagacaggatcacactctgtcacccgggctggctgaagtgcagtggcgcaatcacagcttactgcggcctggacctcccaggctcaggtgattcttccacctcagcccgccgagtacctgggactgtaggaggtgtgcaccaccacacttggatgatttttttgtattttttgtagaaacagggttatggcatgtttcccaggctggtctcaaactcctgggctcaaacgatcaccacctgctttggcctcccaaagtgcaaagattgaaggcatgagccaccatccccagcatgtttatttttttattttgattttttttataactagattgtttatgggaggattggtaaaggagttgacactagagttgagccctgaatgacaggatgtatgatgtgttataactattttatataagcgctatatttgtttatgtccctatttatgcctatgcttaagctgggagagcaagaagagggctttctagttagttgttaagactatatttaaacttgcatattattttctggtttagaagttgctttcttatacataatatttttgtgtttttcacaacacccctgtgaagtcaccttccaaattattttggaccttattttcaaatttattcgtgatgatacatttttgtctgaaaagcagaaagaaaatgaactttgagaatatggaaataaaattgtgttttataaattagagtcctttatagttttaattcttgtttttactataggaatataaacatatattacatgtaactgaatttgtttgtaaacgtgattacatgcagtatttaaagacttaaaaacactgaagattttgagagaaaatgtttacccttgtcctcttactctgtgtttctctctcttcccttgctcctttcttgtttctcttctttattttgccccatttctcttctgtttttctcagaccttcaagtctatgttttctgtgatctgaaaaaaaattgcatatcatctaaaggctcaactaggctgaacatccaagatggatcactcacattattggcagattatactgtcttagctaggcttattgtgaatcacctacacatgacctgtccctggcttgggcctcttagagctgggttccaagagcaaatattcagacagacaggaaatggaaaatactagtttctgaaggccagggctgggaagctggtactatatcagcttatagtataactatattttgttatattctgttgttcagagcagtcctagagccttcctggatttgaggggacggaatatatatagatccaagctctggatgaaaagggtgtcacagaatttgtggccatttccattagtacgttattacatgaggtgttttatatacccccaaataattatcttttacctttttactatagcatagttattgtaaaccttttaaagtcataaatctgtttaataaagaaatactttttccacacaaaatacatacacacacgcttgccctgtcagtattgactacaatttgaaaattctgctcattagtaaaattatcagaatggtatgttacaggtacatgcttaatgtcgtaccattgtgtcttttgtatagtggtccattttccccccaagagctactgaaaatatgactggctttttcatggggaaagaatagcaatttaaattatcttacctattggacagttaaattcacattatatcttatctctccccttttttccaacatttcacatgtattcattcctctgtaagtgatttaatggtaggccttctcttcatctagaagagccttctgttttctgtatggcttcctgtatgacaaaataatctgtttttgtgtaactttcattttagaaaataatgttttaatgtttttgcagggtgtaagaaaaaaawtgataatagttttggtgacatcttttccagattatctaaagtctcaagtgtatatcatgcagctaaatgtgggaatactgtttattctcacatacacacatatctttactaagtaaagggaaataggatcagtggtctatttgtctttatatttttctttaagtcaaagtttttttataaaaacaatttcawgatgttttgtatctcacatggaataaaaaaactaacaacattgttttgacaagattttcttggacagaaatagtgtttccattgttgtatagttaaagaataacatcaatttccctaaaaattttctagcaaatttatttcaggtcatcttaaatcattctgagtattagttatctcctcaacgtttctgaggatcatcccattcttacctcaaatgttttgttgttatttttcaggatgtagccttgtttaaagtgccctactgagtattgacactttaaactattgaagcactctaaattttcatctttactattaaatatggccatatgttgatacatatatttcacttgactaaacatgtttatcagaatgaccatccaacgtatttatgaccataatccactgagccagggcaaaagacccttacttatttttgcatttccatataacaatgaaatgcactctcaaatttgatgatgagtagtttatagaaatattttgctttatcgttaggattaagcataattcatgtatatccagttacatgaaaattttaggtcagaattaactgttgcaacacaggtgaatcagtattctatagagatagctaaacttgaaacaaagtaaatagtgacaaaaactaactgtaatttataatttaaaaatgggaatagtaagtaggtctggattgaacaactcagctgcactgatgtacagtgatgttatttttcaaaattgtaggaatttygcttgtcttcatatgcacattatcggtagtttagtacccttgagtggcaggtagatttctacgaatcacatgttagagaacctaagtgtactaagttctcatatgttctcagggtattgtacttagtttctctttaggaatatcaaatttaatatccctcagtaagtcacttagttatttttcaatggggagtctgtagtcatttttgaaattgcatgtattgtggcagttttagagcagtgctacttaaagtgtgatctgtggacccacagtattgactttacctgggagcttgtttgtattacagaatcttgggccttacccgacttctgtgatcagaatcttcattctaacaggattttcaggtgattcttatgttcatcaatacactagagtttagagaaggcttctcaacctttggtgtgcatagtaatttttgaaagcttgttaaaatggaattgtggctgctgcccctaaaaattctgattcagtaggactgaagtaaggctgaagagtttacatatttaataagctttcaagtgatagtgatactgccagtctgtgggatcacattttgtgtagcaatgctctagatcaagggtgagtaagacttttctctaaagctttgcagatagtaaatattttaggcttttcaagtcagatgatctgtgtaaccattcaaccctrccattgtaatgcttaaaccagtgtgtaaatgaatgagtatgactgtgttcaaataaactttacaaaaactgaggggaaccagatttgaccatcaggctgtagtttattctcccttcatctagataccctttaagtcctcctcagtggaccactaaatgttatcattgcatttagctgcagttaacataatgtacctatagtgatttaatcataagagtttattttctcttttgtgacaaaactagttataagaaattgctgttgttctaactatttaaggtgattaggaccaggtgaaggctctgtgtttctctgtgattctcttgcccttttccttatggtctgcaactacagtcatcatgtcgcaatctagacaggaaggagaaaaggcctaaagggctaacctcctagctgagtcagccgcttgcttaaaactgctttccttgcatctatatttgcttacatttcattggacacaaatcccagcccagtgactttgaacaatactattaattcttggagcctgaagtttttcatttgaaggatggttatctacttaactggcatcattaaacaggttagaaatgatgaatatgatatgcctagctaagagcctagtcttcagtacattgtaactgtgattattattaattaatactatttttccaataattatgccattgcttaagttgcttttggacttctggaatggccttcagaacctaagtcaaatgaactttattatttattgaatttgaacagggttataagttcattaacaggtggtcccatcttgtttttacacatgggctgaaataaacaggtttttgtaaatattgctatagttttatatgtttacaagttgtgtttgttgtcaggttattaatggtagaaataaacatagttaaaaaaacaaactccaaaagggtgctatttgctaaattctgtttaagtagtttcaataaatgctaaatttccagactttttttagaataaaaagataacagaatacagctagagccaatgtctttgcctttagccttgatcatgtaatttttcttaatgctttagaagattattgtgttaacttcataaatgtctttaccactcaaatgaatgcatttggttttctatctgcttccatttcaagattatttttccacagacttaaaaaacaatttaaccctgcatttacttatgttatcttayagataacatggttacgagttatgggataattgacggttgacttttaactgtgtccaatttgatattagaattgctaggcccatgttataatttaaggtctcctgaacctaacttaagttttgatgcaagtgacttttgtaatttaacagaattctacaagattttctcttttaaatagtactttgagtttcaagtgacagacatgaagattgcatatttgagaattcagatgagaaaccagagacattagaaaacaaattgatattaaagttgcacaaactgcttttatattcagtagaatgtataacctggtttgcatttgttttcacatattttttttaactgttactgcagctggatattgcgtgatcacctatatacttggagttggagacaggcacctggataaccttttgctaacaaaaacaggtaacaattaatgactaccagtagacatacattgtatatgcccatggtttttacccctgaatctatgtactaacaagataagttgcggcctggcgcggtggctcacgcccgtaatcccagcactttgggaggccaaggcgggtggatcacctgaggttgggagttcgagaccagcctgaccaacatggagaaaccccgtctctactaaacacacaaaatttgccgggcgtggtggtacatgcctgtaatcccaactactcaggaggctgaggcaggagaatcgcttgaacccgggaggcggaggttgcagtgagccgagattgcaccattgcactgcagactaggcaacaagatcaaaacgccatcttaaaaaaaaaaaaaaaaaaagatgagttgcgtaattgaagataaatcagagagtcttaaaaattcctttaaatgttaccttggaagaacatttagggaaagtcctttcccttttaagaattgcttyagtagtaatcctacagatggtcatttkgcccacacttctgtactggaaaatgcctctttttatggaaagccaataatggatacaagtagcttagtctcttactgtatagctctagttagattgttaaaatgtcctttctcttacaaagtgtgcttaattcactttaatatctacctttaattatttgcttttccccttggagttctatgggataatcattctcagtcccctttgtcctgacaactctttagccctatgtatttatctttatgcagacagcttccrgacttacagctttttacctcagtccatttcattaacttcaaattgaaatatcgaactgcttacttgaaattgtcattatatatggccagttgtaaaaggttgtcctttcctctactacctgcctaaaacctgtttctcacctcatttttccatttcaatagatagcaacatcacctacccagttgttcaagctctagacctcaaagtcattcttaacatgtctcttggcctcatctcatatactgaacctattagcaaatcttgtctactcctcaactccaaaatagatcatgaagttacccactgtcttcatttttactactttgaccccacttgaagcaaacaatatatgttgcctaaacaatttgaatgaaacctgaaccctttattggggccttgtggcttgtccaggcaggccatttgtctgaatgtcaaaccactcctgcctcagacaagagcctttgttgttttctctttctggaaagttatttattcagatctttgcagggctgactttagttattaagttgaagttctaatggcatctctttagagaagccctttctaactccttgatctgtaataacatatctgccctcttcctccaatgctctctacttattactgtattgtttatagcacttatcactagctgaagttaccttttttgtttaattcaacaactatttattgaacagctagtagatgctgggaataccaaagttaacagaagagacagaaatccttgctctcctagagcttgttgagttcttatcatcatcttctccccttcaggatgcaagttccatgagagcaggaacctttgtccattggggttacccccatgcctctggaccttgaacaccacctagctaaagtgttcaataaatcagtgttgaattaatgatgaataaatacttctgctcttccatgaacctgtctgggctaaataattcaagtttcttcmgctttctgcagaaagcagatgtttacgttactctttaaattggtctctcaaaacattttctgttttgtttgtatttctccaaattgtgataataataatttaacataatacatcaagaataatctattaatataatggtcctattaatttataatttggaatgtcatatattcagtttttaattattacatatgaaaaatcatctgttagaacttgcatgggtgatgtcatgtctgtgtcaaagccagtcaatctccttaataaccaagaccaaaagaatataatcagagtgtcatgcagattcttggctgatttgctcatttagcagaggatatttataaaacattatggtgtatttggagagaattgtaatttggaagttttcatgtgttattttcattagctcttttttattggttgaatcttttaaccacaagaatcaagcaaccaaaatgattccatttttttccagattgtaatcatttacaactacaatggaattctttaatataaaaataatgctaaatgacgagttaatgggtgcagcacaccaacatggcacatgtatacatatgtaacaaacctgcacgttgtgcacatgtaccctaaaacttaaagtataataataataataaaataaaaaataaaataaataaaaaagaatttgccagtggaaaaaaaggtagtattacatctgtaattttatattcacaagttctacttgattctttttttggaaattgataaacaatcagacagtgtaaaaaacctttttctgttatactttgaaaagtgcccttgtgtgtatttgtgtgtgtgcgtatgtgtgttttgatgggggtatttaagagtgaaactggaaggaagaatctgcgtaatacacttttttggcccaggtctcagttacttgtttaatggaaattgaattaaatttcagaaacagaagctttaagcttttgttaacagttttccactaragggtgctccagatttgctttttcaaaaccaagattttaccctaaaacgtgcataagtaagatgcacatttttttcctattaaaacagcagttcattttttcttaactgctctgtaattatttcatccagttacattatgcagttagcattttatatctttcttactggatacatgttttcaagtttttagttttggtttggatgaaattagattctataaggagagactgagtatgtcaagacaaatagaagtataatgcattcttcaagttctaacaatttataataattttaaaaagtttgtgtctctagtcatttttactgagagtttgtatttcaaagtggttttaagttacatttcatatatgttataaatagactttgtatagttcaaagtgaattttgaatgtggttcagtgcaggaaatatattccaatgtttttagtttaaaaaatgcctcgactgtcatgaagacttgtccattgtatattttgagtttattatgccttcaaattgaaaactttgggttctcttacataactgtccaatctttcaatggctgatggagcattttttaataatcaagtaacatttttcttattctgcaaaatacaatacctttgttttctgtactcctttgccagcccaagcaggtttagagtctaagattctgctttagattaaagtggttttgaatttcaatcagacttccactgtttcatctgtgtccagttctttgatatgggggatggagcagaagaaggagccacgcagatttcatttcactgatattttttggggacttaaaccagacaaactattctaccctgtaaatatagatgaaatagaaaatgatccagctaagaactctgggcatgtgaaagaaaatgattcgctgcatatagagaatgtcaaaatctatacaagagtaatgttctcaaatgcaaaatattagtctcaattatggatttcccagacctttttttggcccatgctttgtttttgaatacttctagcttggttgaagtttactcagcttgcacagcagagggcgctgtgtatccaccataaatgtaaaagtgtagcgattgtattgtcagtgtattgtcatgtgattaattataacgctgttttcttgaaacaagtttggggtgaatgatattttacttattagtgcattactattgaattcttttttcattattactatagaattctttggacaagaaattacaaagctaggctgtggtgtggagttgaaaaataatagattttttcccaagaatcattgtccttaggagaagctttaaaaagcttacttagggcgatcagttgtgacaggattcaaatgaaacatggtttgagtttatcccagctctttggagaaaggttaatttttttgtttttatttttgggagtttgaggaaagaggggaaggcagtataactgaaaaatatgttcactgcttatggtatactttttaatgcaatcagtatttgaaattcatttgtaaataactgaaaaatgttcacaaaagtaaagagggaactggtatctgtactaaatggaaagttcattgtgagtcctaaggatggccctcctgatcttgagttgccatttgtgagagaggtagtagcttttctgtctgccttgccactttagagtaatacactttgaaacttttctcagaaagctcaacataaagaaaaatggttattcttatttttatcttaattggacattttctttcaatatagctcctgtaatacagggttctctagagggacagaactaatggtatatatatatatatatatatatatatatatatatatatatatatatatatatatatatatatataaaggggaatttattaagtattaactcatacattcacaaggtcccattataggctgtctgcaggctgaggagcaaggagagccagtctgagttccaaaactgaagaacttggagtcggatgttcgagggtaggaaacattcagcacgagagaaagatgtaggctgggaggctgggcaagtctctcttttcacatttttctgtctgcttttatcctagctgccctggcagctgattagtttgtgcccatctagattaaaggtctgcctttcccaacccactgactcaaatattaatctcctttggcagcaccctcacagacacacccaggatcaatactttgtatccttcaatccagtcaagttgacagtcagtattaacatcacagcttctatcctgattttctgtattattctttaattttatgtgaaaatgattattttttagaccaagaaacagtctttcagagtggctaatttgtttggctctaaaggcaaatttttgcatttattttgcccctcccccattgggtgactttgggtaagttacataatatgccagtaactcagtctcttcttctgaatctgtaaataataatagaacctctctcctagtggtgctgtgaggtttgaatgagataagtagacttttgcttggtattgagcacataataaacattccttaagggctattaggttttctttgcttgtttgttttaccaccatgagatgaataatgcctttttttttttaaacttatgtagttcttattkggactcatactattagagagaagaaaatagttaatatatttcaaaaatttctttttcccacttgctataatttgggtatttgactcctccaaatctcatgttgaaacttcatccccattgatggagataggatcaaatgggaagtgtttgggtcatggtggtggattcttcatgaatggcctggtactgtgctggaggtaatgagtgagctcttctgttagttcccttgaaagctggttgttaaaaaagagcttcgtacctcccctctcatgctactatgtgatctcagcacatgccagctccttttcgcctttatagattattgatctttgatactgaaaactattattgaaaaatattgcatcattgtgcttttaactgagtgaaaatactgctaaccaagtatattgtaagggtttaagtaataagtattgggaacagagagtgggagtataaatgtagggagcctttttaattctgaaaatataggttttgctataagaataaattgctgtttgctaccttctgtatttctaggtttagtgatagggcagtaggaaagatacgacattcaattaagacaaaaggcattttatggaaaaaatggtaaataaatgccaggttatatataaaaaattgaagagtgggaaactcactggagtaggatgtcagggaagaatttttggagttgggaattatatggaatctttaaataatagagtttggattataaggaacagcagaagaaagtcaagtagaaggaggagagtaagaagaggtatgaaaaacagaatgaatacagttttgatgttggacacgtttaattattaaacaaaatggaaatttaaaataaactttaccattaaatactgtcaaagagaatagtgtatrttctctttaatccaagaattacagatgcctcaaactacaattttagaaataagttcatgttatttatgcaaataacaggaaaatgtaattagcacctcttactccctatgttttacaagttggagacaaaaggaggttaacaaccagtttgttttatgtatactttatttcttgactgtttaaggtggtagattcgaataagatcatactctctgaacttcttaaacattttttttaaatttcattatgtgtattttttgaacctttacaaattgcattttcaaatattaactttaaaaaaaacattcccttcagtatttatgaagatgaattttcttaaaacattacattaataggctcttttgaaaatacatggctatttaacttgtaaagcataatataatttcattgttagatactgaatcttttacaccttttaattaagtagtaatcctgttgtttgagttttctgacaagaaggatagmaatatactcttcgtttgtaaacagtgatacatagccaatattggaattccagtaattcctgtmatgaaatgaagaaaactgggataggtttcgtattaaaagcatggagctcattaaataaaccatgcatgatggcagttttgtgtcagagattgaccggattggtcatctgttcaartatattggtaacaaaacattatttaaataattaaataaaaccaaggaaaatgtatctacacctgtaatattgtgagcttcttatttctttacctcttttggggcagaatcatgtgtatccaacaaggtaaaagatatatgagaacttcaaaatgagaataaagtaccaaaagaattgcttagcttagttgaacagagaacacatatttagttgaaggtggtaaaatggttaacagaaattgatcatggacttttcatcagttcatggraaactgaaatcatagcatactccccttgaaccttaagagactatagggatgctgcttttccagtgggtactgaagttgtcaaattcacttttgtaaaactggttcctcatatttgttgaattatggactttccttgggratctggtgaagtatattgatctccccccaaaatcagtttcattgtacttagagaccattaaagcccattttgggattctgaaagagtagtttttcagtcataaatcattcagtagtttcttttaatagaaatgaacccccccccccgtgttgacattttatgatcttaaatatgtacaacrtgaaacctcataattgtgcctactcttacatactatacaatgaaaacagatttataaatcaatgtgttacagattagtaaaatttaacaacattaaaatgataggtggtatattattacaactaaattgctatttacatactatacaatgaaaacagatttatactatacattactcttactatacaatgaaaacagatttataagtcagtctttcttacatattagtaaaatttaacaggattaaagtgataggtgatatattattgtaactaaattgctatttatgctaagaatatggtttttaaaatttttcctttctaaaattttttttgagtaataataagttagcagaaggattcatctcaggaatatttaaagaaataattttctactatatgaagggcactgtgcttaaactttagcacaaaaaattttctacaagattccactttctgctgataccttaaaaagttayccaggctctgaccgtctttgattctgaagacttataaataggatttaacatttttagattaccattactgtgacatgattttaggcatagtttcgtgtgaacgaatgagttaaaatgagttaattatgttctgaaggccactctcaaacctgcagttagaaatatcgaagaatttaataggcttcatcgtgaactaatattctttatgaagagacactgtttatatcaattgtgtgacatatcacctacccagttctttaagataattctggaaacaaatgagtttcttgtcaacatccaggcaaactcttccacatagactttggatatattttgggtcgggatccaaagcctcttcctccaccaatgaagctgaataaagaaatggtagaaggaatggggggcacacagagtgagcagtaccaagagttccgtaaacagtgttacacggctttcctccacctgcgaaggtaagttgatttgcttggcacagagaatttgggtaaatttattttattttatagaacaagagaatttgtttaaatgtatgcattctttagcattgatcactttttcaaaatgacaaaggcaacaatatttcctatcttacatttaataccaattttgacaaactgtcaaatatcaaaggaaaaagacataaactttcttgctttcccactatcttattactatatcccaccagctaggaagctggcatcacataagatgaagcaaacatggaggcttccaactcaatggtgttgatgtcactttaataaagtatactttgacagtactgagatagagaaaaggttaagaaacttcataccattcagatctgcctgaagacagtcctggagacttccttctccctagctgacttcctatttctttatcaaagaatataggatattttagagtgatattagttcaatcatttttattckttagcagccttagttttgggtactcttcaggaatattcagaagtttgctcaatgattgtggtaaatgttaaatatgatttttatctctttttaacacctcatcagtcattctgctacaaaaaaatgttttttctccrtccttttttcttcaacaccactaaatctgtgcttccttcttgctaatttacttaggactgactatcatatgtcatcaggaagaaaaataaaagtcatgtttggtaaatttaggacatggctctgatgattattagtcaaaaatgacaggatcatttgactcatgctattttcagcccaactatgcaaaatgaacttttcttagtccagcagaaaatcccagtccaggaaacatacatacatgctcttccaggtgaaaatataaccaatagatagccagttgcctgtgcacatgggttctgtttcctttgacttcataacctttgtgacatcaattactcatacagtgtttagtacataggcactcattgtgtgtttattcattgagaactcttcgtatttgtatgagaaccctccgaattcctgctttgagtctagtgtgaggccatgttcccagttaatgttgatgtgttggtcctaggagactggttttcttacagtaatggggtttcatttatgcactgactaggtcttcattgtaaactcagtcttttccatgtatcacaaacctgtaacaggcattttacaaatggccatgatatttatcctttgggtggcagaatggctcagttttaccttccagaaatgccaaaagaataatgagaaaatcagtgctctttagatttgtttggtgatgcagaagcactttcagagagatgagagtgccatttaatatctgcgatttttaatttaaaatwgtcaaagcccatagaaaactaggtcgaaccatggatatctcagggaggtggcggacaagatggtaaggaatgataactagagaaatgtcaraggtgctctatcttattgaaagcagaaggaaaacaatgtggtttataaactgtcattggtagtggattagtagcaattcaatagaataagaaaacaggcaggttattaatggagagccaaggttgacttccttgctacaaagaaaagccacagagagattaatctaaataattttatgcagagttttaatgaaaactgtttaacttttaaaaatttccctgtacttaatattatctggacctaaattatttgatcaactttttttttttttttttgagacaggttgtcactgtcgcccaggttggagtgcagtggcatgaccatggttcactgcagtcttgactycccaggctcagatgatccttccacctcagacttgcaggtagctggaactacaggcatatgccaccatgcccagctaattttttgtgtttttttgtagagacggggtggggtcttgctatgttgcccaggctggtcttgaactcctggattcaagctgtctgcccaccttggcctctcaaagtgctgggattacagacataaacccatcrcacctggccaacatttattttttaatgttgtatttcagagtatgttttagttggttgaaaaaatgccttcaggatataagaattaacctgatagttgtttggagctaaggttatcggcacttttrttaagctattagatatgatcggccctgttattttatagtttttcttgataattgatcagtttcttcacaaagaatccactgaataacattgtaccacataagcagagtagtccatttgaacttagttataaatggttacaaaatacattatcatctcttattaatcagtacatattaagtctttctcccaacccacacttatgccaaacaccattcttagacactgatgttacaaagatgttctttttacattttttggtaaaaattttcaatagtgaaataaggaatacatttaccagctgggcacggtgactcactcctgtaatccaagcactctgggaggctgaggtgggtggatcacttgaggccaggagtttgagaccagcctggccaacatggtgaaaycctgtctctactaaaaaagaaaatacaaaaattagccaggtgtgatggtgcacgcttgtaatctcagctactagggaggctgaggtatgagaattgcttgaacccgagaggcagaggttacagtgagccaaaatcacaccactgaactccaacctagacaatagagcaagactctgtctcaaaaaaagaaaaaaaatttaaaaaaatgtgtttaactatcaagtaaggttctcatattgtctcagagatgtttgcctagtcaccaaacatcagtgaatttattggtcacatacatcattaactacattgcttcccctctttgaagtagtacacttattgaataacactttcacaggaactctgattttgctgtcatggaaaatagaatgtagaggaaatacatttgaaatactataagaacctcaatgtagttaatggatttctattttcagtaataaaggtttttcctgaaaaatttaaactatctttgtgtgactagagtgtagcacaatagttggcatgaacgtgggtaagagaaagagtgcagtttccttgaacattacatgcaacctgcttctttctaaaaatcctaattatatcacattccatcttgcaatctttgctagattttgcacgctttcccaccctattattgttattattattttttatcttacccttaggttgtctaatactggtttgttggccgggcagggtggctcatgcctgtaatcccagcacctcgggaggtcgaggcaggtagataacttgaggtcaggagttcgagaccagcctggccaacatggtgaaaccctgtctctactaaaaatacaaaaattagcctggcatagtggcactgcctgtagtcccagttacttggggggctgaggcaagagactcgcttgaacctgggaggtggaggttgcagtgacccgagatcgtgccactgcacgctagtctgggtgacagaacaagactccatctaaaaaaaaaaagtggcctttaaatttgtgtttctgagtaggacattaaatgactgtcctatgaagtaaacacttggtattttggttcacttgatgtatcttaaatggaaaattcaggttaatgacaacagatgtaaaagattaataccmaaggtagtgacaaattattcacaaagtatgtggatatctaacctttatatttatttctgtttccctttgctataacaatagaagcgtggatggttaaatttaaatcaggaggtaatccagaaagcattagtatttacttttgttaaaaggaacatcgcattytacacccgtaaaggcagatttttttttttttaacattgatcctggctgcccgttagaatcacctggggagcttgtaggtgaggtggcaaggggaaagttctggactcgctcatatttaattggtctgagatkgggctcaggcattgatacatttgaaaagctaccaaggtgaatctaatgggcagccaaattggagaacttctaatatatctctttcaaaactgactttgtattctcctttatgttaccttctgggtaaatttccccaagccaaaagggggaaaaaatttagggacctaggtaatcacacaaaaacggggtccgaatgatggagagttagttgaaagagcattttttttttttttttttataatatgtaacagcggattgtacsctgctggcatcacattccttgaagccctctcaagtggatcatctctatttccatagagaagggcttatgtaacctgtggcccccaggccacatgtggcccaggacagcttagaatacagcccaacacaaattcataaactttcttaaaacattatgagatttttttttttgtgattttttaaagctcatcagctatcattagtgttagtgtattttatgtatagcccaagacaattcttcttccactgtggcccagggaagccaaatattggacacctctgatgtagaaccttcattatcattataaagggtttcattctggacatttatttttgcccacccctcactccccttaccattttcatccagtcctgtgactttacgtatgatcctagtgctgatgactttaaactaatatcactagccttcatatctcctctgagatatatctgacatctctactaaaaatctagtaggcacctcagactccacatgtctaaaacgaaattcttgaatccctgcctaaaatcctgttcctcttccatttagcctctcctatcttggtgaataacactagtgtcctattaggctaaatcctttgtgtttttcagtttctctatcctctcaccctgacctccattgaaaccatcagcaaggatcatctatttcatctccaaaatatagcctgataacccccatgttggttcctgtccacctggaagtctatgatatagtttctctactttgattcttactcccttcaagatggccagtgtgaactgttaaaaatgcctatcaacgtgtgttactccactccttaaacttagttgcttctcagtgcatttcaaatacaactataccgccttaagatgcctctctctcattttcccattttcctgttgtttttttctcttttaaatcttttaatcaagcagacataaaattatcatgtttatcaattcattatattagtttacaccctcctccagaatgtaaacttcatgaatgtggggaccctgtttgttcagttcaccactgtctgtctgtatccctagtgcctacaacagtggatatagtgagtactaagtaagtgtttgttggttgaatgaataaaatgattacatgagtaggaatggaataacatctgtggtatgcatttatcaattcccacaaagaaattagtaatttaaagctaggttaaagctgtttagctattatcataactttttgttcctaagagtttaagtgggttagggcctgatttgattagactacatcaaggtagaagtttttcattataattcctcttgatttttattggcaatataaaattcagaaatgaggataaaacagataatttgaaacttatatggatagtcatttttctataaaagttccattatcattacagtttaactgttaaacatttaagtattaagtaacagttcgtattttattattattattattatcattatagataggtagatagctggaataaagatcctacatcacccagatcctgcccccatcccctagagaagacagtgcaaggcgcttggttgacatttttactgaaacagctaaaacccttcattgcctaaaaccaacgctttccttacatccatcctgaagatcaaacctgaatctctttttatcagtgctaaggaggggccactaagagcataactacccaaagtggagaggtcccagtggagatttatttaaaactttccccagaaggccccacctctggaaatgaccattcagaatagtaacatttgttctctttggaggaagaggaagagtttgaggattggtgaagagaaactgttagttcctgttggaggccagcatactctgaagatatcattatttagatatcttgcccatttttaatgcagcagagtactagcaattttttctttcttatagaattacttttatccaggtcagtcactgtagttcctgaaatgatgattggtgtatctggaagatactcakgagtgattcatgggatgattttatttccctttcattcatttagccatgacacactgaggtcatcttaaagtagcagattgttatcttcatctagcaaaaacagatagattttaattgttataaaatgtgaattgcacataaagtagatcttcctcagatcccttctaaaatatatatatatacttactaaaaaatgaaaagaatgtcattattagatgattactccaaaggtctgtcccatggtgtaggatttagaaatggtgttatacgaagaccccaaaataaaatatttgtcaaggcttgcatttcattgataccaactgatgaattttctgctggaataatagtaatcactgtagaaatccaagtaccactacttctaaagtattcttaatatgagaaagaaatgcagaattcttaatcgttgctatttttttcttttctgctcttctttaggtattctaatctgattttgaacttgttttccttgatggttgatgcaaacattccagatattgcacttgaaccagataaaactgtgaaaaaggtaatttttaagtaacataaatgaagagctcttctgtataatttttccatattccagaatacaacaacctctcaagtctctgcagccagttttatccccttycttgttcctgcccacagtcacatgaataggttctctcatctggagagacagtttgcttgctactccagccctgcagtcacagggaggaggaagcagcagcccaaagcttaaagaactgagcagagttttcagctattgtccatcatagggaggatttattttaaaattgaatttagccaagttaactgccagctacaatgaatcttcacaagaacacaacagaattcatagtctctctaacatatcatttggaatgtctattatctctcttttttttaataactagatgtgtgaataaacagaaaatgtgacactaagccaatgaaaaaataaaacaatccgtagaaacaccctgagatgacccatgaccgcagaaaaggactttaaagcagctgttacaaatgtccatgcacctaagggaaaataaatgcataattactgaacagataggactatcaatagagacattaaaactaggaaggaagaacaaaatgaaaattatggaactgaaagtacagtagctaaaatgaaatattaattgggtaggcttaacagcagattgagttatggcattagaagtcagtaaacttaaagataaatcaatagaaattatttaatttacttccacagcttcactgcctgtggaggaacaggaacgatgtcaatcattggcaaaataaactaaactagatcttctcatatgtctccattcctatagaatttccctgtatccctgtaaaggactacctcaatagatctgtagtttccaaagatggggatttttttttarttcatatttaaagttgtggttaatttacaatagccttaagtattagaacaattagtgtatgtgttaagaatcttaagaacctagaggacagcctaacataagtcagtaaatctgataccaaataactatttatatacagttaaccctttggtataaaagagaatattttcatatttggtaaataacatttttatgccaagtgtataccttctctttgtaattcaggcacttatgtaagtatgcaagctttgataaattgggctaaagtttattttgattctcctgctctgtagattttttatttccttaaaaatagttccaaaattgtcagatattctctctgtaagtagaagttaaggaaatcaaaagatcgaacttaaggaatatgtttgtcattatctgggatgcagacatgagagagctagttcattgaagatacagccttagatgttcctccaccaaattgttcttgtcttcacttcttacatttacctctcttttacctcctgctatcttgtggctcaagcactctcaratcacctggtatacctccagtacagtgaagagacaagggcactgagctggggctatggattgttgcactgtttgtcatttcttctttgtagctttctagtagtgaaaccctatacttcaaacactaaatggggaccacactttatccacttggaatccccattttctcctagcctgtctttgagaagtatatgtgggttatttacaagagaaaggagtagtctgtaatggttgtgtgtggtggcgtaggattgtctggaagcatgtgccagttaagggttcttgagccggcttcgtgaattctctgtgcctcaatttctgcatattatcgatgagatattatctactgtatgtttgcgtatcagtcggatgaaatgttgcatgtataatatttggcatggcattttgcacaaagtagttcttcagtaacattgacttttatatatatataaaatatacgcacataaatatacatactagtttttctagtacttaatgctactgaaaatcaagtgtagctttaaataagactaaaaaaattattttatctttggaaacgatagacctattgatgtagttttgtgtggggatgtagggaaattcaataggaaaggaaaccttagaagatcacatttagtttgtcagtgattgacattgttcctgttctcatatagacactgaaggtatgggagaatattaatataatctcaccttgcttcatccaattcacaaggaataacaggrataaagtggattattaataaacattccacaatttaaatcatatatagtaactctagattttagattaaaaaaaaaggcacacctttagttaaaagagcagtttttctgtttttgagatgtagggccctaagaaatatttcttcttttcttttttcttaaaaactgtttacaaccaacaagaacaaggtgatatacagagcatataacaaaaacagcaaacttccacactccaaagaatgccattcagaattctaatamgttacaggtcatttatttgccataggaatagctcatgttaccttataatgtctgcatcagtttgattctgcctgttcaaaatgtgccctatttttcttcgttgtaaagactaagagtgttatcttataggttcaggataaattccgcttagacctgtcggatgaagaggctgtgcattacatgcagagtctgattgatgagagtgtccatgctctttttgctgcagtggtggaacagattcacaagtttgcccaggtaagttccctgagtgcagtgcatttttctcaccttctccgtgtactgccccagagtccttggagagccatgcatttctcctgccagttgacatcttttctgtttttctatcaagtcgttttgacatctcaccagccagctgaagtgaattgtgtttcacacgttactaattccaaaacatctgcttttcttagtaatgactaacttctggagcaccagcataggtatttttgttctttgcagtcagtggtgattatacgtcctcttgagaatgattttggatccagcagaggccttagcaattgaaacttggacacttgttgggttttggtgaatgatgaagtgctgggaaagtttagaagctaagaaaagcaatccacatcacacaccagaaaggtctatccatagacttactattagcagtatccacagataagtgagggattacccctttatggtaaacttcagatttaaaacccattttaattatgaattgcataataaggatgactatgaaaatggttagcaaacggaaaaattaggctgcttttttcttctatgccctcacctctcctgtgaactccttcctggtgttacacattcacttaatgattttcctaatcatccaagcttaaagcttgtctgctttgaattttccctcagccagtgaccagtatctcaccaagccgtgtttgtttctttaacctttttaacccagtttttttaaactttatgatacctaggtgtgtgcagtttcctcattgcctaacagcgaagtcaaatctctggcaacttaaggccttctagaatattgtgttctatgctgcttttcaagctgttgtgtaatactctctttctctaaatattttgttgtctttcatcatagtggacaactttgctgctgtcatttcttcagcccagaaatcaatcttcttaataatgtatcttctgtaaacttctacatggcaaaatccaacctgtcctccaagagctcttaatgctctttgattgatctttctctaaatttctgtatgttttctacctttattacgacttgcacttatgttttgctttctttttttccttccccccacctcccacttttcccacattagctgatgttttgctttttattatagatatttagattcccggggccaggcgcggtggctcacgcctgtaatcccagcactttgggaggccaaggagggtgtatcacgagatcaggagatcgagaccatcctgactaacacagtgaaaccctgtctctactaaaaatacaaaaaattagccaggtgtgatggcgggcgcctgtagtcccagctactcaggaggctgaggcaggagaatggcatgaacctgggaggcggaggttgcggtgagctgagattgtgccactgtactccagcctgggcaacagagcgagactccgtctcaaaaaaaaaaaaaaaaaaaagaaatagatatttagattccgttataactcttcaaatacagacttcctgaaggctgggctttgtctatcagtcacctagtagtgcaatgccttatatacttaaaaaatatttaatgaacataaaggaattcctgcctctagatgttagcttatactctttttctagctcaataaaaaggtgtttttccctgaacaccagtcttgatcatatttttattacaagggctgcctcagggtctgcttcatgggtcattaattgtaaccaatcatttgttgagaataaattgtgattcaaatagtatgtgactcatcaaagtcaaccagctagctaaaggtggaccttgctctacatatagcagaacagaatattttagaggtatagggggaaaaaggccagagagatatcatgaccacttgacatctgtgacaaacaagggacaaaaccaagacttaaacccaaatattttgactcccatatttagtattttttaaaccagatcttttcagtgtcttgctcatcactatactacattagtgtcaatcaaacttttcctggccacggcccatctctgtgtgtgtacaccttatttttttctttttttaagctcaactagttamaacatgcttgaagtcagaaactcttaacttctgtgtctttgcatttctgtagcaggggatttacccgttgtagttggtcatttatattttatcttactccatctctatctacaagtgtagaaatatctctccatcatgggttttccttattccatacttgtagattctggtttttctcctttgttttcctggagaatgatataatggagctaaaactccaaacttgaaattagtgctgctgcctaacactgatttcagtaatctatagctacacaagcatctccagacttagtagctgaaaaagcaataatgatttgttatttcttacttaggatgcttcagtcaggaatttagctagagcccagctatgaggtttttttgtttgctgtaatgttagctggcttcactccttcagctgtattcgactggtagttgggtttgtcttggaggtccagcaaagcttcactcaataggtctggcacttaggtgttctctgcatggactatctctctccacttcctctgtcatcatttcagactcctgcccaaactgctgctctacagcatggtgactgatttccccaagaggatatgaaggcagacgtggcagtcctcttaaaataagtcccaagagcagcccagattcacagagagaaaaaatagattctgcctcttgacaggaggagagagttgcatatgcagaaaagagaggaattaagtagcatttttgaagatttcactgccactcagctaatgtgctccagcttaaagttgagccttcaagttctgtaaaatgaattagtggcatgctttattttagtggtctagttttgaaattctattgttaatttgcataagatgcccattttgcttgctggatctaaaaatagaagggccatttttcttaattctctttattaaaaatggaggagaaaaagaggttgataaaaagtagtagtttttagggggccatagtattatttaggggagctagtaatagaaggactttggtttaccaaagtctctgggcctcagttttcacacctataaagtgattgacattgaggttaaaacatctgtttttgatataaatttaatataatgtcaaaggttaattgctttataaagctaatgttgactactgcaagggttggtaaatgaaatctgcctctcccctctccccatcttagggatggttacattgtgaaagttgctgagagctctttgagttattggcgtgtacctattcttctattcatagagaaaataaaatatgaatggcaaaacgaattggtaaaattgcagtgggcatgctcttaaattagggagggatcattttatacacattaacagattattataattcttgagaagaaacattaagtctgtttcctaggttcctgttttctagttcttcattacaatagtagatacgatgtagaaatcctgtaattaacattacttwagccttggttgttacaggctcttttggactaggatagattgttgataaccttgataatcaaagttactgccacatgaaaataagagttaagaacaaatatttgaattattctaacagtctaaggatcaccatcttagatttgtaaaactggaggtttattgcagcatgaatatgtagatgaactttttaaatatcatttcttagctctccartttacagtgatggacagtgtttgggacaataacagcttcaacatttattggaatgtatttcatacaatgcttcccatttttaattaaataaccattactgtgataatacaagtatgttttagtgttatccctattttatagatgagaaaactgaaccacataaaaagttgttttcagcctggctcagtggctcatgcctgtaatcccagcactttgcaaggccaaggcaggcgaatcacatgaggtcaggagtttgacaccagcctgaccaacatggtgaaaccctgtctctactaaaaatacaaaaattagccagacgtggtggcgggcacctgtaatcccagctagtcgggaggctgaggcaggagaatcacttgaacccaggaggcagaggttgcagtgagccaagatcactccactgccctccagcctgggcaacagagtgagattctgtctcmaaaaaaaaaaaaaaattaataaaataaaagaaaacttagttagttgttctaacttatcagacagattcagttcttttttaccagaatttcataytctttatcctaagggatgaacttaaaaatgtttgtgatatttcttagatttccttaaatatataatttgtgctccaaaataagggttacctatggatgtttaattttactggaacttgtttaggcactgaagcatacatgggatgctaaataaggtcttagcttcatacaaatcttttcaaataacaattataaaagcatagttgtttcttaattgatctctggagtttattttctctttgaaactcacttgtctacatatattgtctaagtattgatactaataaatcacataggcattcaaattcagatgactggcatctatttttttgtcacttgtagtcatctattataatgatgcaatattgttaatcgatttatggtaattttagtacattcccattaatcattgtggatagtagaaccaactttttaaaaaatgggagtagattaatacatgcttaaagaattacagatatttcagcataaaagaaacaacattcaaaaagaagactaagagttactagatacaactattatatccaaatgctacaaaagcttgttttctttcatcatgcaattccttaggaagggtagagattaaacactgcaatatttgtttcctagcaacacccacatattagtgatacaaattttccactggaaaacaattttattttggtcattgtctttgaaattgcatcattgtaacccttctctatgccaaaatgatcttttttggcatcttgttctgtcgccccccactggagtgcagtggtacaataatggttcactgcagccttgacctcctgggcttgagtgatcctcctgcctcagcctcccyggtagctaggagtacaggcatgcaccaccatacccagctaatttttaatttatttttttgtagagatgaggtccgactatgttgcccaagckgttctcaaactcctggcctcaagcaatcctcctgcctcggccttttgagtgctgggattacaagcacgagccaccatgtctggccttgaagtgatctttacagtgctttcragggttgtatacgtgggaaagatagaggtcatatagtttgggtcatgtacagttgcacaagtaggcctttcactggtgatctcttacactgcagtccatttcctgtttctgcttytccctgtcatcctttcttttcatttatggtagtaaaaatcttgagaaaggggtgtgttttccagtaatgttaatacatactaaatctaattaattaaatcttggcagattaactagagacagaggtttttgtttttcagaatgactgtaaaaaaataaataaccaatagattgggttcagaaggttcagaagttccagctcaagatactaggaacatagcactgctgtccatttaaagggaatccttactcatcacttgcagtgttcaaggaggaaaagcacasgtctaggcagagagacacctgattctatagtcacttattcttaagttagagaccagttgcctttagcttaagggaattcaactgtgatatatttgggtggatttcaaaacaaaagaaacaaaaaaaatggaaggaggaaaatggtgtggttattctgcttgaatttcccctaaagaatacctgtcctctaaggaatgtgacagtggctctctcaaaagtgtttcagttatcaagtgcctctcatgcataacatggcatcttactaygctgaaggtgatcccaaaattgaaaattctgagtgtttggtatttatatcacagtttctaagtgcaaaccagttgctgcttaaccagagaaacagggttttcttgtgtcattgctgagggaaaagcttctgattttggactttttaagagatacatgtctcttatgtgctgcctcctcaagggcttttcttgagtaatttttttttttttaatttgtattcctgtttttcctttctatgttgactttagcacctaaacccagtgtagagtgatttcactttatttgctgtcctctttcatcttctttaagaaggcaaccttctaggtcagtgagtgagtctcttggttttcagaattgggaactaagaccattcaagcccatttctccttgtatttctctaggtaaagtacaagcattttctgtgttcagagtatgtataaaaacatttaccttaggtttatgtgtatattcacagcacctttgacagttaagagatcagtacttgtgctggtgttaactcttccattttttagttacttgaaagtcgctctttcctgggtcagkggaattttgtttttgtttttaagctttkgaatagtaaatgtaacaatagtaaatgtttagatatacttacaaccctagtctgttagtcttaaatataccataatgtgttttcatttgatgaactttgtttgaaatttgatcttacatgatacattagcaaagctagttctgttttaggaccatacatagctaatactctttttggaaaaggagaactatcacacacaggaatttttgtttatgttttttttctttaatttatttaaagtccttactcccagacttgtagtataattttgggtcttgatttcaggtgaacagataagtagaraataaactatatcttaattctttaatgagaatgtactctcctttaacaaacatgtaattggctttaataataaaaatgttgataaaactctaattcatgaatttattatttcctgctgtaaatattaagtggcatttagtatttagttgtgaaaycgatacataagtatgtagctgcaaaacaaactattgcaggtttaaagcattactagtactcgtatgttaaatataagtacagatctttttatatgtgtgttttgtttttatagcattactttattcatactaactttccattttttttcttttggtgacccacttttgcctcatattctctctttgtactttttgaaacttccctttttatgtaaattgaccactaacactgaattccgttttgcaaattgaagctctttaccctttcatgttccctcatacgtgccagactagagaacatgggatgctctctagttttaaattgtgttttacttaagtacctactcatacttcccatgaggttgaaagccgtgtagccttgagtactcaaatagccatgtacaaaggtaaaaagttcatatcactcagtatatgtaattcatatagtctccctttatatttagttcttcttattttaccactttaaacaagtgtgactctttttataataactaaaatttgtttggaacatcaggttttatcctactttatggatgcaaaattgtgacctaaaaagaagagaaaaatcatcatttctgagtttccatttttagggacctaattttatcaytaggaatgaagaatagcagtgtaaaatatttcagtgaacaaaacaaaaagtattgatttgggggtcaaatagaaatccttttaatctaaaacaaattatttttaatttagtaattaattttctaaagaatgagatgattcccttaccagtggcttaagtaaataatgtaacaccaatatatcacacacagctttttttcattctgtctcccagatctaatttatttgaatttttcttggcagaaataacaacaacaggaaaaatcattaatagcaaagtattgaacatttaaatgtgccaggaattatgtaaagttctttctctgtatcaactcttaattctcacacctgtgaagtaagtgtactacaagttatgtatttacagatgagaaaactaaggttaatagatgacaaagcccagattcaaactcaaaatattttgagtcccagatctagtcctatatttataagtaataatatgtatataaatacataatatacatttatatatatgtatttttatataaatgtttatatataagatatttagtaactagtgactatttccagtcaccagctgcattagcccttaccaagaaagtcagcctgtcctttgaagccagactttgacttctctgtagcatgaaagtcctctgtggcatcttattccattagaaagctgtttcatctgcactgaaaatctgttctctagtgtagtcaccttcatcagtgatcttagctagattgtagataacccgtgtgcagttcttccatcagtactgaaaatctgttctctagtgtagtcaccttcatcagtgatcttagctagatggtagataacccgtgtgcagtttctccatcagcactggctgctttaccttgcatatatatatatatatatatatatatatatatatatatatatgcacatatatatatatatatgtatgcacatatatatatgcacatatatatatatatgtgcatatatatatatatgcacatatatatatgcacatatatatatatgcacatatatatatgcatatatatattacatattcatacacatacacacatacatacatatatcaaagtcttaatttagagacctgaatagcttttgttgtgagtagtgagtttttaaaattttacttgtaaatttaaattatcttttaacttttcttaatctttcacctacccatcaargraaaaaacgttagctgtgtaaacagacaagtaagtgtgatatataaaggagtcgccaggagctgttaatccaagataaataggataaatgtgggataacatttattttgcacattggccaaaactagtcttgaatttcattgacccacctgtgctctcttgttccactgcagtcagcattgctgcacaactacccattaaaacacatgatatttaaaaawcaaagaatacaggcacttgctatatgacaaatgtttgcagcttgtaagattagttaattattgtaatagcaagagtcagcagaatgccccataattttcagcccaaatgccttgcagtttatttctcattcatacaaatttaattttcttatcttctccaaagaagatttttaaacacttgaatgtcatccttgatagggtttgccatgtttgcttcattaactgcttttagtaaggttagttttatactgttgttttctttccctctgtgttctgtcaaaaccttttataaaaattcttcaaatgtacagtagttgaatattttgggactgtctctgctatatgttttttatttttatttttttcctaaagacacagacatttcaaagtatttgggaaaaagaaggcataccttaaagattttttgatctgaagtccagaccactgcaataaatgacttttttgttttcccagtgcatataaaagttatgtttacatgatactatgcagtagcattatgtctttaaaaactatgtgcctatcttaaaaatattgctaaaaaatgcttaacaatcatctgagctttcagtgagttgtaatctttttgctggtggagggtcttgccttgatgttgatagctgctgatcagggtggtggttgctaaaggttgagtagttgtaaatctgtgaagtttgccacatcagttgattcttcctttcacaaaagatctctctgtagcatgtgatgctgtttgatagcattttgcccagagtagaactttttgcagaattggagtcaaccctttcaaaacttgctgttgctttatcaactaaatttatggaatattctaaatcctttgttgtcatttcaacaatgttcaaagcatcttcaccatgaattgattccatctcaagaaaccactttgcttatccagaaggaggaactcctcatctgctcaagttttatcatgagactgcagcaattcagtcacatattcaggctccacttctaattcttgttctcttgtagtttccaccacatctgcaattacttcctctactgaactcttgaacccctcaaagtcatccatgaagaatggaatcaacttcttccgaactcctattaatgttgatattttcacctcctcctatgaatctcaaatgttctcaatggcatctagaatggtgaatcctttccagtaggttttcaatttgttttgctgagatccatcagaggaattactatctgtggcagctatagccttacgaaatgtatttcttaaataataggacttgaaagtagagtaactccatgatccatgggctgtagaatggatgttgaattagcaggcattaaaacaacattaatcttttggtatattccatcagagctcttggatgactgggtacattgtcaatgaacaatattttgaatctttttttctgagcagtaggcttcaacagtgggcttaaaattttcagtaaaccggccgggcgcggtggctcacgcctgtaatcccagcactttgggaggccgaggcgggtggatcatgaggtcaggagatcgagaccatcctggctaacaaggtgaaaccccgtctctactaaaaatacaaaaaattagccgggtgcggtggcgggcgcctgtagtcccagctactcgggaggctgaggcaggagaatggcgtgaacccgggaagcggagcttgcagtgagccgagattgcgccactgcagtccgcagtccggcctgggcaacagagcgagactctgtctcaaaaaaaaaaaaaaaaaaaaaaaattttcagtaaaccatattataaacaaatatgatatcatccaagctactgtttcattkgtagatcamaggcagagtagatttaacataattcttaggggccctaggattttcagagtggtaaatgaacattgacatcaactaagtcaccagctgcattagcccctaccaagaaagtcagcctgttttgaagctttgaatccagacattgacttccctgtagcgtgaaagtcctatgtggcatcttattcattagaagcctgtttcatctgcattgaaaacctgttacttagtcaccttcatcaatgatcttagctaaatggtagataacttgtgtgcagtttctttatcagcactggctgctttaccttgcacttctatgttatggagatagcttctttctttaaacctcatcaaccaacctctgctacctttagacttctcttctgcaacttcctcatctttctcagcctttatagaattgaagacagttaaggccttgctctgcattaggctttggcttatggggatgttgtagctggtttgggcttctatccagaccacaaaaacttcctccatatcagcaataaagctgttttgctctcatcattcrtgtattcactagagtagcattttaatttccttcaagaacatttctttgcatttaaaacttggctctttgatgcgagagtcttaacttttggcctatctgagcttttgatatgcctttctcactaggcttaatcatttctaggttttaatataaagccagagatatgcgactcttccctttcacttgatcacctagaggccctgatagcgttcttaattggcctaatttccatattgttgtgtcttagggaggcttaaagagaagaagagagataggggaatggccagttggtggagtagtcagaacacatgtaatatttatcaattaagtttgccatcttatgcagacacggttcgtggtgccccaaaacatttacaatagtgataacgaagatcgctgatcatagatcaccatagcaggtggaatagtaatgaaaaattttgaaatattatgagaattaccaaactatgacacagagacacaaagtgaacataagctgttggaaaaaatggctctgatagacttgcgcaagcagagttgccacaggctttcaatttgttaaaaaaaaacaaaacaaaacagtatctgtgaggtgcagtaaagctaagcacaataaaacaaggtatgctggtatattagagacctttggttcaatagcaacatttttgtcatacatagacgcatacacgtgtacatatgcagtttttcattgcgtccaaattacttccaagttatttagactccctcgtatgttagtgtagaccctttgcagtttggcttttacctgcactttcaacccttatcatcttcaaaagccttcaaaaagaaccttctttgtagctctgttgattcaccgccgctacctccaggcaacacacctcttctctttgcatggaatgagttccctcttatttccccaacttttgagtgtgtgtgtgtgtgtgtgtgtgtgtgtgtgtgtrtgtatgtaagagagagagwgtgtgtgtgtgtgtgtgtgtgtgtgtgtatgattctgtctatattaatttggtcctcgggcattttgtcttaatttgagatctcccacagaatctgagacacttcctggcacatagtargcaccaaataaacatatgtggttttatatgagtgccgagtaccatttctttaggaagtttattttctctgataatkgcctttagtaaaaatatttaaattgcttcttaaattctaaattacattatttttattcacatgaaaaataaatcttgccaatttttttctagagtgacactttaaaatgtgtcagattaaaagccatcaacatcttggcatttttcacatttgtacatgtacacatgcatgtgcacacacacacagacacacttgtcagcaaggtgttttgccttcactttttctctgagtaataatgaagtgaaggtcttagaaacagaattcatgtaagcagcattcataattcctccaagagaatgccagtatatttgtatcaaacaaaaagggcacgagttatggatgactcagtgtatattcagccaaacaaagaaatcttcgttgattttattcctactggggatatctcagtattgaacaccattaatagtgttggccccaaaacagctcttcactaggcctctcgacttcttcctttgatttgatttccagaccatttctggaatgaagtagttgcactctctgggataagctacaggttttcacagcctctcaaaatgtggcaccaagaaccaagcacactactcaaaatcactttatctaaatcactttagaattcagtggaatttttgccttcctagtgctggatgagatgatttttgcttgtctcgtgttaattacattcatcttgagcttacagtcagcagacaccctctccttgaattattttctcatataaactgatttttaagtgaagcctcaggaatcctatacagtatagttaattgcaatcctcttggtagcatttagcaaactaattaatrcactttttattttattagtagtcttttttaaaactatagactattgtttatctttgtgaataattaagtaaattattttctgtttatttctttttaatttttgtagtactggagaaaatgaaactgggattgacccatcaakatgcttggctcaataagaaaaccackttaggagcaacctttgtatattggagacttcagagtaaccagcaaggaagagaaatcttaatcttcaagttaccatattttccaaatattacatggtacctgagttctgcttccttggatgtcattgcttaaatatagtcttgaagggcttgttttgaaatattgtatatattttttcaaatgtatacattgttaataaattaagaaatgagaaacattcttatttatgtacatgttatgagagttctggaggaagtaatatgttgaaatagtaaaacattttagtttttgagtttaaaatgttattttttcctcttatatcttcatatcaggacagcagtaacctgaatttagattgtcacagtttacaagtttttgtttgttccttctttcctctctcttctcccactcacttttgtgtgttgtttgtttttgcctaatttacatgtttaaagttctacttaaaatttttcttcaagttttacatgtgatggctcattcttctgcagttcaagaattgcttatatttttagaagatactcattttctcttacaaataattaattttttgtaaactacagttaatagttcttctagcttgtaagtgtgtaaagtagaatatgaaaatgtggctatttagataactggccaaaaggtcatatgaccaccagttttagtattgagcataagatatttttacatattcatgtaagacaatgtaaattgtctttctgcaataaattttttggatgcaaatttagatttcaaaagctttttgatgttataaaggagttgaggaacaaaaagctctttgaaatagctcacctagacctgttaatgtaatatattctttctgaattaagcaaaattttttttgtcttttaagactagaactaatccctctagcttttttactggaactttggggaaaaagaacaaatacaaatatacaaatgatatgaacaatatggtaataatcttttgcaacttaatatgttacatagtcatatgacttggtcttggaagaaaaagaattgttttggtgctgaataaatattagaaatcaagtgacagagaagatgaaggtaaaattgtggcacagtttcagagaatgccgttaatgataacgtgttatttgtctcaaattcttagccctgggcttgcctcttcagagtggggttaccggcgagagggcaagcatgtaattaagagacactctagaggcatatggaatatagtttgtataaaacatacctgctgattagaaaaatggtaaaaatgaaaatacctttgtacatcatcttaagagagcttatatataaactaaatgggcaggctccatcgtctacctttctttttcttttcttcrcatgtttatgtcttttttgttattagtcagacatttttagccctctgtatgctcattcttgtagttctatttctattgaaacttcctccaaaacttttctctgaattacccttgttgaaactgacctttcttccgtgtgaactcctacacttgcatctcctatttcaggatttggcatactttttctttaatgggctaagaaagtaaatatcttcagctttggggggcatatgatcccaatagcatcaacttaactctgctaactggaaggcaaaagtgtatcatcttactcgtctttataaactccacagcactctgcatagatatgaccatgtttataaggaactcaataaataattttgacacaaacatgaaattctagaagggcagacactgacaactagtaaggaagttgatcatgagtaactttgtattcagtgccaccttaacaagaattgtaaagaggataaacctttctaggaaggttgatgcgtgttgggtgaggaaggagcatctctcaggagggtaaacagtagctgtggttttgctgagagattttggctgtgagtgacaagcctatatcaaaaagaaaagtggcttatcaatctcagtttttattgctcaaagcaattctttactcctattttttccaaattccattgtttttactctttagagctctatcctcagagtgtagtctgcatatttctttattatcattgccatgtgacttctttggtgacaagttcagtgatatttcaagcatgatgttttgagtttgagaaatgtatttgtgaggacacatcactttaattaaaaaagtgtgagtactatggtcattaagttattcagagtgagatttctgagaggagaagagagaatgtagatggcagttattgagagtggggctataggacaaaaagaagaaaagtatggttaacattgccaaataaagggtcatacagccttgctttttgctggagttagcaaaaatcattctccatatgatagttttagatgttccccagctcatttgtattattgagttttcagctgggtatatattataataacagtcaacatgatgtaggggctcagtattacatggcagggctatactaattgcttcatatgccttatctcattattctgtgagatagaattgtctcctcattttttagttgaaataactgaagtttaaagcaattgaatcatctgcccaaggataagctgctggtgagagcagagttgggatttgaagtcgagttagaccccagtgatcacagtcttgacgattaaattcttccagctttcatttttcactgagataatggtagtgatagtactgacctctaatgtgtgcatttgtgggtatgtggtccattcagctttaatccccagaagacaaggcttattccttttcttatttttggtcatgttttatttttccattgcttttaacaggattaccaaaggcacactcagtagtcagtaaacacatttctaggaaaggtgttgtgtcatcatgccacatattcatactttccttgggttggaaaatagatcattcagtaaaaacatacaggaaaaatgaatcttgccaatgcaattgttaacctacaaccataatataccttaagtatatttttgcacataagtataacattgcgatttaaaacaataaaccagattgagattctaaggagcattttgtaagtaattactaatgtttattttagagagatcacacaacttcaaataaaaactgacatagattgaacaccttgagaataaactttagtgccaaatggaaaataattttttacaagtaaatttgaagaacaatgtgaactttctataattatatacagaaaatatactgatttgccaaaatgagtaattttgatatattaatatttcacttataagaatgcataccacctgatccaggatgggatccaggaacagaaaaagaacattaggtaaaaatgacagaaatctgaatatagtatagagtagctaaaaacaaacccaaaaaaaaaaaaaaaaaaaggaaaaacagaataagcctcagaagatagtgagcatcccacctgggtgaccacttagagaagctgaggtgggacccctgcatccgataagtggctgcactagaccacaggaaccagactccactgtaagaactagagtgggaatggacatgtcaaaacctcctgggaaccttattaaatgtgcacattcccaatccccactcctgagcagccaaatcaatctgcaggtgggccttgtgagttttcccaggggattccgatgcctgctagatttaaccagtagatgagatgttaagttatcctgtagtccagagattccacaggccagtgtcagggaacaggggccagggctgggaaggcataagaacagaagataaatttgaggctctgttacgctggtcatccaacccaaccaggtatctcttgttatatgctaacttcattttccctttcttgtccatagtgggaaaaaataatttttaactggctatgtagttaaaaaacctaacaaaaagcacttttctatataatgagtggtttatattaagaataggtacaatgtaaatactggtaagtgaaagttcattttgttcagtgctatgggctggtacattgcatttcaacactagttttttacttttatctaccctgagggtagataacccatattccaaaatacagtattattttcatttgctgtaacattttaagaaatatgtagtttctaaaacttcatatactttatatggaatatgaacaactttaatatgaataaatagtctagaaaaaaatttaggaaaaattgccatgaaatcatgagctaagtcaatggttattttaaaccacttaattttgagactagtatttcatacagaaaaagctaatactgatatcacacactaattgtgtataaaacactaggaatgtcaaaatagaacataagaaaatgagtctagtggacccactgcatagtgtaactttgggatgaatttaaaagaatatttaagtcacagtcaattttctgttggtctaattttaccaaataaccccctaaataagaagtctgatttatctaaaatagaagttaacatagcatcccagtattgccattctaaaactctggcatgtaaatgggagaaatggaaataagctcaaaatgggtagagtaacccatttctgcatgaaccatagaatttaactagaatttggctggctcatgcctgtaatgccagcactttgggaggccaaggcaggcagatcacttgagcccaggagtttgagaccagcccgggcaacatggtgaaactccatctcttcaaaaatatatatttgtgtgtgtgtgtgtgtgtrtgtgcgtgcacaaaaattagctgagtgtggtggttcacacttgtaatcacagctacctgggaggctgaggcaggaggattgcttgagcctgggaggcagaggttgcagtgagctgagattgcaccattgcactgcagcctgggtaatagagcgagacaactctatctcaaaaaaaagaatttcactagaatttatatcttcagtgtttgcattagattgtcaccagcactatctgccttgtgactgtcaggactaatccttatatcatttatcttatgtcctttacctcagtttatgtctgtcaccacaagaaacccagacctccctaatcataccatatgccctggtcttacccacatacagctcggtacaactgcatttccccaaacctcagaactccttgggccatcactgtcagagacatttgaactagagcaactccatcttgagtagggactgggtataatgaagctgagacccactgggctgcattcccaggaagttaggcattcttagtcacaggatgagataggagattggctcaagataaggtcacaaagaccttgctgataaaacagtctgtggtaaagaagccagccaaaacccaccaaaaccaagacgggaatgaaagtgacctccggtcatcctcactgctcattatacgctagttataatgcattgacatgctaagagacactcccaccagcaccatgacagtttacaaatgccataacaacatcaggaagttaccctatatggtctaaaaaggggaggaaccctcagttctgagaatttccttgaaaattcatgaataatccaccccttgtttagcatatgatcaagaaataatcattaaaaaatagccaaccagcagctcatgctgctggtctgcctatggagtagccatcctttctttattaacctgctttcactttatggactcccctgaattcttctgcaggagatccaagaaccctctcttggagtcttaaccaggatccctttccagtaacttcagcaggatctgtgagtgccagtttccttctgtggtgcaaaactaggtgctaagtacactttttcccccctttcctctatttttaaaagaactttcagcccttttgaagtgggtacattgtctggagtacataccctggggttcattgttataggagaatttaggacacagacacacgaggagtttaggagcagaggtttaataggtagaagagaagggaaagagaaacagcttcctctatagatgtctgcactgacaccgtggctttaaggcatggcccatgatgtgtctccgagtggaaaagactggttggtggtgaatgcgccaaattttatagtccggtttgaggaggtggtttctgattggttgcatcatgtatgacgtttgcaaggtgcatgtggaaggctggtcgccccaccctaatcttatgcaaatgggctttccagttgattgggtccatcttgtgtaacacgtggctggcagagaagggaagatgaagccaccatcttgaaaatgt

SEQ ID NO: 95068 - DNA, 41232 bp, Homo sapiens
tattcttgggtaggtactagttgtagctaaagcaggtgaatagatataatcccaatggtgggctcaggccccagccttgatgaggatggctgcgggagctcacaatttgatgtcctgaggttttatcagggtgaggagtaggagctacctcagctcccttctcaggtcatcaagctattcacctcacagtctcattcctgtcccagtgtttcagctattcagatcagtcaggacctcttttcatctacaggaatgttgatgtttcttgcctcttgtgcaggcttgaatctgggggggtgcttctcctgtggggcttgtgcttaccctggattgttccagcaaggctgtctatagctgcctctatgctgcattcctgtggaagaagcttcagctgtgtctgcagtgtagtgccagggggaacaaggatgccttctctagtgcccttcataatcacacaggccacctgcctgttggggtagaggtgcagactttctctactgtacccagcactgcaattgtgtctctgctgtgagaaacttcccaccagtagaaagatctggaactcacggcctggtgtttggattcttttgtcccatggggtgaccccttgatgtggtgctctccctcttcccctaggaatggggcttcctgagagccagactgaagtgattgttattcctcttctgggtctagccacccagctaggctctgagctggtgctggggaatgtctgcaaagagtcctgtgatgtgatctgtcttcaggtttcccagcatggataccaacacttgttctgatggaggtggcaggggagtgatgtagtctgtgagatttcttggttgtagatagactcagtgtgctggctttcttgaatgctggttatgctagcggtgaagttgtcatgtggacagactcaggacctttagttagccagggtgttgcagtgagtggtattagctgttgttttctccttcctggaagaagcgttattctgccaagagttgctgtaatggcctgagttggctggcttccagccaggaggggacacttgcaagagagcaccagctgtggtagtagcagtgacatttgagcttggcctaagttgtctaggggaagtattctggtttcccaggcaatgggcagggccataaggctctcaagagtttatgtcttttgtgttaagctacaaggcaggtagataaataccatcaggtcggggcagggttgggcgggcctgagttcagattctccctgggcaaggcctgccatggcctgctgggggataggaggggtggatctcaggccaatggggttatgttctagaggagagtatggctgcttctgctgtgcagtagagtttgcaaggggagtggggattagctcatagtgaaagtcctcatccagctcccacagagttggtgaggccagtcttgctcccatggtgccccactaacagcactgagtttagatccaggcagctggtgtgtagaactcagacctgccctgggccatgagcttccctgctgaggaagaaagcatggctttcaggtcacacccctccccatctgcctgcaatgctgggtgcccagcttctgcccttgtatctgcattagtttccatttgtccgcccacccctggattctgttcaagggtgctcatgcccacttgaaattaccacaaaactcagttggtagcttatttcactctgtgactccttcctaagtttggtggctgccttccctgagggcccctgttagatatggtcagggatggcttccctgggctcaagctggagactgagaatgcctccaaggctcttcttgctgctgcttctacttttatattttgtgctgctccctaagtccattccagctctaggtaaggctaaagccttctcccatcatctggattttcagattccacagtaggaatgtgtgttcagaggcaggctctccccttttcctacactgagaattcagttttttgcctgtctcacagactttgctgtggtgtgctcctttcataggatctgcgaattcttttgatttcctggtaacttcctgcagtggttcttggaataaaagttcacagtgttaattgctacacactgttctgtccttccaagtgggagaggcacactagcactgcctactacctgccatcttagaacagatagacaaaccaaaacatattttttttatttttaattttttactatactttgttttagggtacatgtgcacaacgtgcaggttagttacatatgcatacatgtgccatgttggtgtgctgcacccattaacttgttatttaacattaggtaaccaaaacatatttaaaaggatgtaaatttattgctaagtgtggactcatggaggccccatatggccacctggttcttcctgagtccttaaatcttccattattaaaaactctgtactccattactcatcatggggtagacaaaaaactagttctgggaagacctatatccttaataatagactctcatgtatctcctgctcttataagctttgctgtaactaaatactgcaaagctttaatccattatatgaaagtgtgttttccccaggtaaaagccttttgtgatacactgagtacaaccaacctttcacaatctagaactcagagattgagtcttctggaaataacatcccatctgagaaaaactgctcttgtatcccattagaagagattatatcatgtacttctctcaccacccacagtaaaacttcagggcctcgagttttggtccataccttgtaactcaaaagagccccttcaaactcttggaattatacacctgttggagatcttaaggtagggaagtttctccccagaagcagatggcatcctagacatggacagctttctcaagatcatggatcaagacttctctgctatcatgactatcttatctttttttctattttttccatatttcctgctgggaaatccatgggaccataatttatagatggctttagctaaggctcatgctctaacaagaaaaactagagcaactgttgggtttctggactgatgccaaaaaaaaaacccctaggaaacaattttattaatgccaatgcctctctgtgaaatgaaagccaccctaaaacctcaaaagcagattggaaagctatctttaattttgtagatatcactgctacttgctttcctacacttactgaaagcaataacccaacttctccaattaataacctaccagctaccaaatatagaaaagctgagtgattcttttttttttttttttttagattaacttgcttggctcctttattattctcctttattattaaacttcctcagcataatgtgatttgggcagacagagatgttatcctgtggcttattgttggcctacattctcttttttttttttaaatttattttttttttagtatttattgatcattcttgggtgtttctcggagagggggatttggcagggtcataggacaatagtggagggaaggtcagcagataaacatgtgaacaaaggtctctggttttcctaggcagagggccctgccgccttccgcagtgtttgtgtccctgggtagttgagattagggagtggtgatgactcttagcgagcacgctgccttcaagcatctgtttaacaaagcacatcttgcactgcccttaatccatttaacccttagtggacacagcacatgtttcagagagcagggggttgggggtaaggttatagattaacagcatcccaaggcagaagaatttttcctagtacagaacaaaatggagtctcctatgtcaacttctttctacacagacacaataacaatctgatctctctttcttttccccacatttcccccttttctattggacaaaaccgccatcgtcatcatggcccgttctcaatgagctgttgggtacacctcccagacagggtggtggccgggcagaggggctcctcacttcccagacggggctgccgggcagaggggccccccacctcccagacggggcggcggccgggcagaggggcccccacctcccagacggggcggcggctgggcagaggcgccccccacctcccggacggggcggctggccgggcgggggctgccccccacttgccgggcggggcggctggccaggcgggggctgcccccccacctcccgggcggggcggctggctgggcggctgccccccacctcccggaccaggcagctgcccggcggaggggctcctcacttctcagacagggcggccagtcagagacgctcctcacctcccagacggggtggcggcggggcagagacactcctcagttcctagacgggtcgccgccgggcagaggcattcttcacctctcagacggggtggtggggcagaggcgctccccacatcccagatgatgggcggccaggcagagacgctcctcacttcctagacggggtggcggccgggaagaagcgctcctcactttccagactgggcggctgggcagaggggctccccacatcccagatgatgggcggccaggcagagacgctcctcacttcctatacggcgtggcagcagggcagaggctgcaatctcggcactttgggaggccaaggcaggcggctgggaggtggaggttgtagcgatccgagatcaagccactgcactccagcctgggcaacattgagcactgagtgagcgagactccgtctgcaatcccggcacctcgggaggccgaggctggcagaccactcgcggtcaggagctggagaccagcccggccaactcggcgaaaccccgtctccaccaaaaaatacgaaaaccagtcaggtgtggcggtgcgcgcctgcaatcccaggcactcggcaggctgaggcaggggaatcaggcagggaggctgccgtgagccgagatggcggcagtacagtccagcctcggctcggcatcagagggagaccatgcaaaggggagacgaggaccgtgcaaaggggggagggagatggggagggagacagagagggggagggggaggggaaaagctgagtgattcttgcaaaaggtatatattatgcttccaggcatcatatgctcaagacctggggactatgtgggtataagtaactgattgtataacgccactggatgaaatccagtaatgtcctttttcactaaatgtggttatacacccttacagcatgttacaaagggaacacaaaaaaataagtttcacactggaccttgttcaggagcagtgttgacctatttcactgacctatcctcaactgccactaggtggccctcttttccagcttccaagggcctacattgggcctatgcggcctcagtatagcctcagatttcctgctatgaagcttaatgagcccagcactggctctagctatggtttgttcctttttgggtggagtggatgtgtggttcttggagaatctactactttcccgtgagtgcagtgggagactgcattagagaatctagctatcctgactgcctaaacagagcctaccataatttttcactcaaatctttagtataaatataattgtctttgctttctgtaataatatctttgaagaaatacggatttaaaaaaatcatttaatattctcagacctgcaacatgggaaaaatattattattattatcatttttgcagttgagagggctgaaatctcgcagggtgattaagtttattagcctctctaaagtctcagtttcccactctgtaaaatggaagggtccctatctctttcctactgctttgtgagtatttaaggggatggaatttgggaagcgctcagcacccagtctactattggcacagggttttaaagccacccagaggccgaggcgtcaaccctccgtttccctcccggtgctccttccagcgcccggtgtggtcgatttggcgggggtggagcgccaggcgcgtgcagagccgggcggaccagcctctccggccaaggcgggaggcggagctcgtactcaagagccgcctcccgggcggctggggcggtccccgagctgctttccgcgttctcccctctccgcgggcagtgctagctcgccgcggccgcctccggggtgagtacgctggctccgccggcgcccgggaaatgcagttccctggacacgggcgccgtgcgagggtagccgggcgacggccggggtcagtcccagggctgtagcggggcgggcgtggggatgacgtggcggcgtccgtggggcagtcccgcctcagccggagcggtgggccgggccgggggcctacggaggccgagcctggcgggaggcaccggctcaggtgctggcgttccgcgcggcgccgcctctgctgcgggccgggggagccagacgaggtgctgccgggtaggaaaaaatccagggctcattcataccccaggtcacgattccggggtcgcccccagcacttctccgccgggtgcatcaacctgaaaaagccccttcttcctggaaaccctccttctccagcgtttcaacggggaaactgatcagctgacaccagccccagtcctgcgaggggccggcgacctttgacctttctccaaaggggttggtcacctggattataaaagacttcggagacagccatccagtgtttgttgatctgtatcccttgatgttctgtcttccattagataagggctgttaattcttggtttgaaaaaaaacagacaaagtccaaaggactctgcatcgaggagaggcctatgggttggtagccttaggagagtagttatcaacagtgggtgggtgtgcacactgttgcaaagtgttccagagtgggtgagggatggggacgtggcggtggtgagggtactggtagacctcctcagccgtttggtgatgaaaaggaggaaaaagaaaatggtaatctgagcgtggaggcgagttgtggcttttttttttttttttaaatttttaaagaaaggaaaataacacctttaagatgcaagaaaatcaaggagagatcaggatgaataggattcagggtccggattgagaaactgggattcagaagggagggctattcccgagacccaggcggggagtgctggaaggtctctcttgggagaggagataatgcttgattggatatagttcagaagtttttggaattttgtcttctagagcaggtttgttctttatggaaattgtaaaccccatgaaattgcaataactttcgtctacctatagctttgatcagattgaaaacatacgttgtgaaaaagtactgacctggattgaactgtttgactacataatctaaggggaagtggatagagagggcaataaaatcagctctgtggttgtagtttatatgccacttaatataataagtatttagtatctactttaagccgagctaatagtaatgcctgccttttccagagatgcatgcaaatgttttgggaactaaccttctctttgaagatcttttattcagtggaaacatccaaagcaaatcagtgatggttttctattctttgttttaagccatcagtgaacagtggtttctaaaacctggctgtgtgactcagagttacctaggttctygataaaaatataatttttttttttttttttgagatggaatctggctctgtggcccaggctggagtgcagtggcacaatcttggctcactgcaacctacacctctcaggttcaagcaattctcctacctcagcctcccgagtagctgggactacaggcccaggccactactcccggctaatttttgtatttttagtagtgatggggtttcaccatgttgtccaggctggtctggaactcctgaccccaagtgatccatttgcctcccaaagtgctgggattacagatgtgtaccatgggcccaggcaaaaatatcaatttcttgactccacttcaggcctttgaaataaaaatctctggggctggagcctgggaataggcatttcaaacacagaccacagtgttctctggcactgaagattactaacagcctctgaagtttttctttgagattggggctttttggcctatttagaacaggttttcttaaaggttatatgaatgaattgtcaaacttatgtaactaaaagttataattcctgtctgtgatgttatctttaaattttaatgtacagtcgtcctccttattcttgggggatatgttgcaagactgacagtggatgcctgaaaccgtggatagtgccaaaccctatatacgctktttttttctatatatgcatacatatctatactaaagtataacttataagttaggcacagtaagagatgaataatatctaataatagaacagttacaatatgctgtgataaaagatatgaatgtcatctctttctcaaaatatcttaccgtatttttttgtggttaactgaaacygcagaaagtgaaaccaaggactactatattttaaaggaaaactatgtagtcattttatcagaaaacaatattgtttctgttgatgaaaactccattttagaaaaattagaagatacaaaagaaatagaagttttctcctaatactgtaattaagagatgaccaccagtgactatcattttgtatgtaaaaggtatgcacacacacatgtattgcataattggtattatattttatatacttttttttttttttttttttagagacagggtctctgatgcccaggctggagtgcagtggcatgatctcagctcactgcagcctccgcctcccgggttcaggtgatcctccttcctcagcctcccaagtagctgggactacaggcatgcgccaccatgccaagctaatttttgtacttttagtagaggaggggtttcaacatgttggccaaactggtcttgaactcctggcctcaagtgatcctcccgcctcggccttccaaagtgctgggattacaggcatgagccatcacacccagtctttatttcatatacattgttatatctttttttctacttagctgttatgagcayttttctgtgtagttattgtaaacattttaatgaaagcatatgtcccatcatatggatgtattataattaattaaatcagatcgctattgttaacatttagactcttcaatttttggttattttagcaatgttggtttgaatatcatggtatacctctctgattattttcttagaatacatttctaaatgatggaatcaaaaacctttcaaatacatttttaaaatctcattttcacatatcttcttactgcttttccttaccagagggaaaactaacatatctgaaagattgattgcattccaggtccattctcttatatcagtggttctcaaactttaatgcagataagaatcatttggggagcttgttaaaatttcatttttctgagtcctagaggctgctgttctgacccattggctttggagtggggcccaggaatctgcagttttaacacattcctttatgtatttgataaaggctctcttggaaccagatgttgagaaatgctttttaaataaatggccaaacagactcaaaacatttaggttacttgtcaaaagccattcatgcatctgataaccagaatttgaactcagctctttgtgacttcagagccctgttatacccatgatctcagagctttttaaacctttttaaggtttacggtgaggtgcccctaatgactgcagaaagtaaactcctactgactccactgttggtttcttagggacagctgaaagtcacatataagtacacartgaacttctattggaacctcccatcagaaattctggtgaattctctattatgctgcataacatatactacacaaaataactttggttgtttgggtgttgcaggaccacctggcttcatgtgtggatttccayggctcttgcccagaggcgggtacactgtgttccaatgtgccacggaactcacgcagtggcactttgtggcttcatgaaggaagaggcaggccacgcaacacttcctccccaagccaaggagaagtatcacttttagaggcagaggagcggaaggcagtgggtgtgaccaaaagtgccatttgttaaaggtgaggaccctacccttagaaaagtgttgatattagtgaactgaagggagctagtatcggggtgagcctttttaatttttaaaatcctyctcaggtggaattttgtactcatattattaatctttatttcccaccttcttttttaatgtttcattccttttagcagtagcctggaattatgatgtgtccttgtgtatttcaactagtatatcctagtccgtcatttgttactaaattgagtacctgctatgtgtcaggttggtttgaggcactaggaatacaaaaacaatgattctccttgagaattaagttaatttactatcatttgttgactcaggttatacctagtctctgactctttatttttagttttagttaattttagacttacagaaaagttgtaaaaatgatacacagttcacctagcttcccctaatattaaccccttacataaccatactacattgatcaatactattaactaaactacaaactttattgaaaattcatcaattttcctactaatgtctgtttttttttttctgttcccattgtattttatcaaggatcctgcattttatttagtttttctttctcctyagtctcctccaatctgaaatagttcctcagtttttcctcgtctttcatgattttgattcttcgaagagtaccagttaggtatatcgtggaatgaacttgtggtgagcgattggatttctccactacaaagttactgtctttccctttgtagttaagaattatcttggggragatactttgagactatactgtttatcctcaaatttttgcctgttagtttagcatccactggtgaaccttgtctgcaacagttattaagtggtgtttgctgagagtgattttttttccatcgctcactttcttactagttggaatttaagaaaagagccgccccttctcttctattcatttatttgtttgatcatttttatcagtgtagactagtggatagtcactttatcctatgggttaaaatacagtgccatcattttttttttaaattactcaaatgcttctaggttgggctgttaggagcttaatctctgggtttaaatgacttgtacatgtaaatggctgtcatcatttttatcccattcctaccctgcccagggaaccactgtccctttaggatctggccagtgatcatttagaagtctcctaaaggagttgtaattgggataatgaataccaaggcctaaggaaagtggggcaatgtgtgtgtaaaaggtaaactcctaggaactctgcaggagtaaaaagagtagcaaaataatcagtctttcttctggtgttgccccagggagccccaaggcatcaggatcatgtgcctgggacaacatcaagcccactcacatgccctgtgtctgcaaaattacctgataggttcagagatgttggaatgctgattttggtgctcatagctgccgaatgaacacaccctttctccttggtgcaaatgcttagtaaatatttttagagtgatacatggtgtcctccccacccactttagtggagtaaaaatgtgtgtggttagagattctccaagaatgatacttagcacttatgtttcctttccttttgttatagcttatcttccttgccagattttaaamactattatggaaaatctcaagcattcacaaaagtagagagaaagaaaggactctcaggtacctatcacttatattcaagacttctcagtattttatccgtcttgtttcatctgttctcccactttgggatgttgttctcatatttgacaggaaattgcagacattgagatctagaaaaagatagaaataaaccctgagtacaaagactaggctttaattctctttatatggttttccctttgcttgaaaatagcaggtagtcagaaaaagactggttgaattgagtggaggaaaaccaaatatgaaaacatgaccatttttaactaactacggggcagacttctagaaaggaaaagartggtaaatcttgccctaaataacttctttcatgttgcctgaatttgttctcaatactgatgatgtagtcccttggcacttcaagacagccttgactgaaaaagaaaataactctgagactcytgtgagaattaagggtctctcaattacttaaatgttagtgtaaataaatccaatatgatggcactttcccaaacaccaaccaggagtcacttgccctaaaaataactttctttaaaaagtcattatgtttttctaattataaaaatattacatactcattaaaagaaaaaatggaaattacagagttagaaagtaaaaatcatctcattaatcccagagataacattatcttgggcaatattctgataacatttgaacatgaatcacattggtaattagagccaataaatacatgtgttcctggccaggcatggtggctcacgcctgtaatcccagcactttgggaggctgaggtgggcagatcatttgaggtcaggagtttgagaccagcctggccaacatggtgaaactctgtctctactaaaaataaagaaaaattagctgggtatggtggggcatgcctgtaatcccagctacttgggaggctgaggcaggagaatcgcttgaacctgggaggcggaggttgcagtgagctgagatcacaccactgcactccggccaggccgacagagggagactccgtctcaaaaaagaaaaaaaaaaaacttgtgtcctggaaatgtaccagatataacagtgtacttgggtgcatcatctcattaaattcctagagcaactttgtgagataaatatttttcatcattttatagctgggacacaacggtgagaggggttgcctccagtcacttggctggtctttcttgaaacatagatggacagacagatgacagacccttcacacttcagatgtttactcacaggagccaaggaaaccttacttctgaacttccttatgctggctctctgtacagtttttgggagagcacttagacttagaaagataggtaagaattatttttaactgggtcagatgtctcagaagcaggattagtaatgaaggcctaatacttaagtaattattaataatggctccttgcttttagaataaatgtcttacctttgaacagagtctgtaagctgcagttgagcaatattagtttatgaatatttgcagctattcttggataggtttttttgtttttgtttttttaaattacagtcatccctcagtatatggaaggaattggctccaggacccctgcatctacccaaatccatgcatgctcaagtccttttgtcagccctgaggaacccacatattggaaaagttggccctctgtatacacaggttttgcataccgggaatattgtatttttggtctgcatttggttgaaaacaatctgagtataagtggagccgtgcagttcaaacccatgttgttcaaggttcagctgtattttttaggacagttttagattcttaaccaaactgagcagaagatacagagatttcccatgtaccccgtgccttgggtaggtttttaaatctcttcccactctgtagaatgagggaggtggatgtgtggtctttaagatcttttctgatttcaacactgcagtaattttatggtcataacctccttccacttggtgattctctcttccaggggactctccctctaaaaatagctcttagaaaagccatgttcccagggctgggtgyggtggctcacacctgtaatcctagcactttgggaggccaaggtggatggatcgcttgaggccaggagttcaagaccagcctggacaacatggtgaaaccttggctctactaaaaatacaaaaattaactgggcgtagtggtgcacgcctgtaatcccagctgcttgggaggctgaggcactagaattgcttgaaccgggaggtagaggttgcagtgagctgagattgtgccacggcactctagcctgggcaatagagtgagaccctgtctcaaaaaataaaaataaaaaataaataaagataagcaatgttcccagtctgaattttctaagattaagatccttattttaaaaattgccaatcctagcatttaagcctcctacaattaagtccacaagaggttgtctgattggccccaggaacctgatgacttactgtcaccaggtgggaagagaacagacctccaggaaggcatttgatcagacagtccctaggaaacggaaggcagatgtgggagagaggtagaaggcccccaagggaacctgaatattcaagggtctgtgttgggactacccaggcaccaaggggagaaaagaggaaatatccatgtgaaggatgtggagctgagcacctgggcggagaccccacgctaccacttactagtcgtgtgggctttggcaaggtacttaaatctctccaaaccttcctttccttttcttacctgtaagatgagactagtaattcttacatcatatggttaaatgagaattacataggttaatataagtgattttaccccagtgcatggcacagagtaaatgcacacataaattgccctttttatttgttattactgctttcagcattgacttcctgtgataccttcacaggaccctgaacacaggccatattgtttaattgcttcctgggtcaaacattccccaagaactaacctcccttttcatctatagcattgtgtttagagagaaatattttctaggtttccttcaaactaacctgaaactaaatttctggagttgtatcctttagtaagtgtgaaactatcttgagagtttctgaggtggttgttgttttttacagttacttactgcctctctattcaccattaaaaaaattcactttgttttcattgtaagactgccatattataaaatgatatatgtaaaatatatgtaaatatgacaatatgtgatatacaaaaatatatacatttatataaaatatattaaaaattctaaaaatataaaatatattaaaatataaaatatattwttttatattttataaaatatactattaaaaattattaaataaaataaaatttataaaataaattttataaaaataaaaattattaaaaatataaaatatattattaaaaattctaaaaagaaaagagaaaaaataaaccaccccagckaatccyattctcctaatataattattattagctttctagactttccttaattgtatatattgttagttgtaatcatagcacagatatagggcttactttctgtttttctttttgtcatttaagatttaatcataagtgtttccatgtgattatttagcatagaaaatattttggtctccattttatttgtttgagaatatgtttgtctatggagatyatctgtgccctagctttagcattttctgtgttcttctgagaacatgtttagaatttgaggagagacgtgatttgtccacacagagaggatatggtggatgttgctggcggcaaaccaggtatccttgtcaggtggcctttaccactttagtgtattttctgtggtccagggtgggccctcagctaggtggtcttaaaaacatgatttttgtcaataattaagagcatagccccctcttagaagtgaattcatattatcccatctcatgctactgaagtatgaaatcagagtggcaatttatcagctgacagtgagaaatacagtacaaaaagtggtgtttcagtgtgtctacttgttggtcaaggtgggataacactttacatattaataaattaggtcatctaagccccacaataacttttctaggtagatactatttttatccccattttacagataaggaaactgaggcttagttaaatgactggcccaaggttatgtagctgttatgtggtagagctgtagtttctgtctaagtccaaactcctgatcttaaacactgtgctgtagttttgttattcttacagatagattgttgacctcctgtttgggattctcataatgtttcttgacagactccctcctggcccccattgcaatgtgccctgtgccagtgcctctttgagaatatagcattcattccctgttgttgaggaccatgtttttctagctgtcacaggggagaagaacttttcccttttcccttattttctctttgggtcaaaatgtgcttctgtaacaaggcttcacatttttttaaatcctccttaaaactgtgccaggaaggggcaactgaggcagagaaccattagggctatgtcttaggctgtgtccagctcaggtctttgcagtctccttgtctcckttgcctatttgttctrtccaacatttggaaattgcttcccttcttgggtggcagacagcctggctgataaactagagagtgcttctgtgatgtattgatgcttggaacctctaaaacctctggttttcsaatctctaratgctaagtggaagacctaccattacggttagtcaaggtccatcrgggatgggttttcagtttgtgctggagtgaatcayttcaggatagaatttccatttgaaacaacgtgtcttttgtgattgcgttttagactgttggagcagaactactgagaaaaaccaggcattgtatcttcagttgtcatcaagttcgcaatcagattggaaaagctcaacttgaagctttcttgcctgcagtgaagcakagagatagatattattcacgtaataaaaaacatgggcttcaacctgactttccacctttcctacaaattccgattactgttgctgttgactttgtgcctgacagtggttgggtgggccaccagtaactacttygtgggtgccattcaagagattcctaaagcaaaggagttcatggctaatttccataagaccctcattttggggaagggaaaaactctgactaatgaagcatccacgaagaaggtagaacttgacaactgyccttctgtgtctccttacctcagtaagtgttgcttttttcctttgattaagtagtatgcaaactttttatttaagtataatatgtacttgcctgtatsaaaacatctcatgtaccccataaatatatatatctcctgtgtcacaaaaactatacattcaaataaaataaatataacatgtacaagaaagtacaaaactcagaagtgtaccacttggttaagtttcagaaaatgaacatacttgtttaacaagcatgtaaattaagaaatggaatcttgctggaaccataggaactcccatgtttctttcagtcaccactccggcttcaagattctaactctacacattagatttttcctattttggaactttacaaatcggaagcatacgttatgtactcttttgtatttggcttctgttgcttaacrttacttttgtgagatctgttcttatggttgcktgcagctatggtttgtccattttcattgatgtatagtattccgtcataggaacagacccacttttattatccagccacaaaagtytagcagcacacattartagcgtccattgatctaggctggtggctctgccccatgtgcctcctgtcctcctcctgaaactagtgggctagcctgggtatgttctcctcatggcatcagcagagcaccagagcatgagaggagaaatgcaagcacattcaagcctcagtggggtcacatctgttgtattcctttggccaaaactatggagtcaagggacagagactaggtaagtttttcaatgtggtctttagtgtttatttcttaaatatgttgtatgttttggttcaccttttatgtcttgcctctcaacttatgttaaacagtaaattagtcttaagatcagggtgccagcatggtcagggccctcttactggatattgtcctcacatgcctttccttggtgtgtgtgcgcacacacatacatgcagggggaaagggaaagagagagggagagagaaagacagagatagatagatctcatgcctcttgctctttttataagtgctttaatcccacctggcagctccacccttatgatgatctcatctaaacctagttacttcccagaggccccacagtgggcattaggaattcaacatatgaatttttggggacacagacattcagtctgtgtacccctttcctagttgagtcacagtcctgtattgtattcatattggcatgctgcttctctttagtcatggaagagtcaaagtgttattcctgattgtgtattccttcacagattatacaagctgcgatgtaaaaatgagtcagggaaatgcaaattttactggctgattattccccttgcttaaaatgctcacagtatatttaaacagtaaattcattcataaagaatagagggacagtgatgcattactgggcaagtactggactaaaggtgatgtggttggtgatgacttaaaatgggccattagtgacccaaggaggggcagatcttgagaagatgttggggtagggggagtgatagggagactgatagagagtaagtggaagcagatactaggttagggcacgtaaaaagttatgacgatgagaaggtgagccgggggactagtttatattagacctgttgcgtgaggctctttgagcgcgcaagaacagagacacagtcaggttaacgatggggattgtgaacaggccacacaggagaccatctcaacagctaccccattatctctggtagctcgatagcccagcatcagctctagtagttgtcatctgtgtaactccattccttactgtttgtttttagggcattactgactgctgtgtcttgcatgtagaccctgcaggaaggctctcgtaggccaattaytctctttgggtggcttgaagaagttacttaccttgcctgctgttgagcagagcaccaaggtgccattagacacgtgarcctggtctaagcagccatggccagggtaggggatggttacatggaacaagtcatggcgactttcgcacaggaagggcctatgactgctttactcagaaggggatagctcaatttgcaagcatcttgagattttacagcctgaccagtatacgtggaatttagaaacaaacaaacaaaaaaacctgagctgttttcctcctgtggatggctttgggtttcatctgtttggattgcttccagacactgagcaaatactgtgctcgattggaaacgtctgttgtggtggcaaaatgggagagttgttgcagtgccacacatacctgttacagctgggttagggagggagactggtttctacttctttttagtgctttgcttacagggagccagggtggttccagagtttagggaaggggtgggaagagtgccttgtccaggagcttgattctgtggaatgctgttgatatttaagagattttcccctcctcctggaatttggtgaaggaaaagaggatagaccaaagttgaagttactctgtctagccctgccctttgctcttaccagagttcaccaggatattccctcttacagatggatcatagagcaagttgattacccagccacaaggaaatgcttatattatatatccaccacttgcttttgcagccagtaaccttagtgacatgatgctctggccattatcatgactaaatgagcctttaaagtaatcataataaaagctgacatttgtagtactcactgtgagctgggcagtgttctttctatgcatattagctcgtgtaaacctcaacactttttgaagtagctactgttattgtctgtgtcctatgttcattgtaggaggccagagcaagctcattttcaaaccagatctcactttggaagaggtacaggcagaaaatcccaaagtgtccagaggccggtatcgccctsaggaatgtaaagctttacagagggtcgccatcctcgttccccaccggaacagagagaaacacctgatgtacctgctggaacatctgcatcccttcctgcagaggcagcagctggattatggcatctacgtcatccaccaggtgagcgtgggggcagaccagggcctgccctcgaccctcctyttctctgccagacttggccatgtgactgtttgtctrtgttgggtaaaaggaacatcagactatcatcaaaaacgagttctcttacctcatttatccttgaaaggagtagaggaaattcttgtctcagagtgtggagttatgggttcaagttctgggaaattttactgcccttaaaggaacctctggaggaagcctgttttgtgagcccttccatgttagccaatgactgccctcagatttccccggaggcttcctggccccttctgtttctttctgtgcgtgccatgcactatatgatgagattctggaattgtctgtcattatcaaccatagcaactcaatggggatctagacagaggatttgaaagaacattctgtattagtagctgtggtgctctatggctgccaccacatttctgccctgaactttgccactatttattatgtgaaacatrttatgtttgattttcactttctggattcatctatttgacttccagaagcatgatttggtaggagcacagcataactatcggctgcttttgaagagcttacctctgaggtcagtggagtggatgattaaagatacctctatttggcattaaagtttattgaaagaaaactaagacatcagtttaaacatcagtgtctaaacttttcacagttatccttggccatccaaggaggccaagaagagggataattccccctcaaattcttataaattctaagaatgtcagcaaaatcatcactactgttagaacaggtaatatttcttttagataaaactttggacaactcagaggaccagctctgcagtatagacttggtgataaactgaggctcttgaaaatcagtgtgcttatatagcacacctatgtctgtattttagtacttggaacaaaatgttactattatattgttttatagctatttttgtttttaaggttgttggtcatagttatgatttatttgattctgagttcttgctcaggacagtaacctacaaggtatagtactatttttatgaatagaaaaacatgtttgctttgggccaggcccggtggctcagcactttgggaggccaaggtgggtggatcacttgaggttaggagtttgagactagcctggccagcatagtgaaaccctgtctctactaaaaatacaaaatactctgttaaaatactaaaaaaaaamaaaaaattagttgggtgtggtggcacatgcctgtagtcccagctacccaggaggctgaggcaggagaatcacttgaacccaggaggtggaggctgcagtgaggtaagatcacaccactgcactccagcctgggcaacagagcgagattccatctcaaattaaaaaaaaagaaaaagagaaagagaaaaatatgtctgcttcgtgttattcttatcaggaaaacattgtggtaacttctgagaaatacttgcacttttatgataaaccacttaactggaattcattctgaaggaatttgaatgaagcagccatgaaaaaattatttaatttttttattacagcttcaatcatattacaggtcaaactgtgttcttttattgcccagtgacgaatctacctccataaggccactgtgaggattagcctccaccagtagcattataacaggattctcttacagggatttctgagaaactttaaagtagcttagaaatattagcaataacyttctctttctataggttgagatttcttgatcctttctggcaagctattaactaagtctcttagaagcttagtgtaaattcataacagagggtaagattgggattacctagggttgaactgtgaagcagtaatactaattgacatgactagtatataagaaaggttttgtagttttatacagaatacgtaaaggtatttgtaaaattttaagagaaaatttttttttgttaactgtggtaagaatatttaacatgagagctatactcaatacattttaagtgtacattattattgattatttgagttatttgtattttaaagctgcttttaaaaaatttttaattgtgaaacacacgacgtaaaatttaccatcttaactttttttaactttttaaaatttttgctatcttaactattattgagtgtgcagtttagtaatgttaagaatatttacatgcaatgtatctatgcataattatgcaatatattggttgcataamtatatrcagtgtatttatgaaatcaatctccagaacttaatcttgcaaaactggaactctctatcattaaacaacaactctttggatttcaaggactgtttctaagttctggaatataagtatgtgtgaagcacgaagaaaaaaatcaaatggtcttttattgtcattgcatcttctctgtcagatctttatgtcacaagtgtagtctcgtgcgtagaataattagaataataccatctcctgaatcctaactaagaggcaaacaatatgaaactttatctcaggagcttttcaagttttaattttcatatctctaggctgaaggtaaaaagtttaatcgagccaaactcttgaatgtgggctatctagaagccctcaaggaagaaaattgggactgctttatattccacgatgtggacctggtacccgagaatgactttaacctttacaagtgtgaggagcatcccaagcatctggtggttggcaggaacagcactgggtacaggtaaggtggttctgctgagggtggcttaggtcgagaagctcaactattgtgatcaagactgggtggaacaagcatccagagtgtcataagaaaatgagaaatagaaaaaatggtccataatgtatgcatcacttaaagtgcaaaacagaagttagagaatgtaatgaggaaaaagccctacaacttcagcagaggatcacaaagacaagggaaagcattggagagaaatatcatccaagcattgcaggtggtggccagtctcacccgcagcgcccctgtcggggggctttcgcaagctttcccacactgactagaatgcaagtaacttgtttgtctattcctgactccccctctaggaggcaacaggctggtgtccttagtgagacctctgttgagacatcactttccagactgtggcctctttctagaatatggggagaggtgggggagggcatgtcctctgagtagtcttctcgggagccaggacacccaggacaagttcatttctctcaaagccactgtgagaagtgccagatgccatcatctgtgtcttcattccccatcccctccacccttaagaagggtgtagctgcttttcagccttatttgattcaccagctcctattcaagcacaaccaagcgggaatagtgacacagaatgtttctctgcaaatgaaacrctatattccctcatttgtgtgcacacttacctgtcagctttccccaggccctgctgttcatgggtgctcatatctgtggtgctgactgtgctggaggccataagaccagtttgaataaggcagagcacctgccctcacagggctccccgttragtgtcagtgtggggagacaggtagctacagtggagttgcgttaattttgcatttctgcaaatacaactataagcacttggtaaggaggggagagagggacaaatgaagagaggaagaagaaggcaggagagaaagaactgtgaaactatcaaataatgctggagattccaccagtatgtactctacgtgagtgtgaagtggaaagtgagtctcttgatacctcatttgttctgggcttctgtgttgctctctcactttgggcaatttaagagaattcttaagtaacattgatgtaggtgactgttgcctcaggtactgactttaaacccmggctgtgtgtaagctgcaggacataaacacctagaacaaactatggtgggtgagagcacagtgtctttaagaaacaccttgaagggaagggtttaaagctgttccccaggtaaggtggtaccttaatcttgtggaacaacaagagcttctcagcagagttccaagacatgccagagagcacagcgcagttttggggaaaatgcaatagttcactggtattctagaaggaatgtctgcgaggagaggcaagaactgaggctaagcaggagccagattacgcaggccttctttagtctgatayggagttcgaagttgctgtggcaggggttggggagctgttgacacgttacagctggggaaggatgggagaaagcttggttcagctgattttgaatgtatcagatgaagcaagggaagaggggaaagctgaggggagagacgccacatgtctgagttagggcgggggctgtggatccagagggcaaggagagaatcccatgatttttytctttggggaaacttgatctttggatctaatcttattatctaggggttttgttttctggtttctttgagtcacttctgcattgaggaaagcagtgtatcatggctgggcaacttggttttttcaaaagcatgtcactatctgttcacttactctgtagtaagatgtcactatttacaacacagaacacctgtaccttagacacttaccatagatgataatcttaaacttcccattgcccagatttttttaaacacctggttgcaccattcatttctaagcaatcacagaggattgcttaaggacaggttttttgctgggattctagattttatctttctattaagctgaaccataagaaggctgagctcttggacattcctgccaggaactgattttcactcatgctttggtgtcacagtcatggatttcatcagatgccgctcactctgagaaacagcatatgtatgactcttgctgtttctaacttgccattctaactggccagatgtttcttttataactaggtatcagaaagcctttgttgagtaactgacaggttttcttaatatgattcaggtaattgaatgtgtttccccttttgatcgagaggctctgagccaaatccatggccctcttttagaaattgaaaagaatcttatttgcagatcagggttctaatgtatttcccatcttaattttctattctgatttaaatgtttctagggtcctggtttatcatttatgattttctcttttttgtatgtatcatgtaagcagcctcatcttttgtggctggagagaggtatgtataagtaatgtaggtaggagttgccytcctcctggactacttgattttgctgctttgggcaaagtccctgtggcaggcaagttcatttccaggcagctgagtgtctgccccrtgctggcaactgtgtgccccagtgccacagagcttaagtcagtacatgcctcatcactgtcacaccagccccacaagtacaagcgcaagaaaggttttcaccttacacacatgcagagggaagaagttaaagtaagttgccccaagtctctcagactctgatgaagccagaaacaaatcttgtttctcactgcctatgggatcagtgatgaagctctggaccagccagtggcaaattttactggcaagaactcctttggtaccagcctccttcctacaaggattctattgttattttatgactacgttttccccacccttgggccttacagggctttaaaaataaataaaaaggttccagggccagttaaatatttatgcttttacaggtaagaagaaaagccaaaagcaaagatcaataaacacagagatagttgtcatctgacaggcacctgagaaacagttcctttttttttttttttgagacagagtctcactctgttgcccaggctggagtgcagcggtgcgatcttggctcactggaacttccacctcccgggttcaagggattctcctgactcagcctcctgagtagctgggactacaggcacgtgccaccacgcccagctaattttttgtatttttagtggagacggggtttcgcagtgttagccagggtggtctcgatctcctgacctcttgatccktccgccttggcctcccaaagtgctgggattamaggcgtggagagacaattctttaacccttcttgctgacttgtcttcttctgcccctccccactccagctcacccctctccaggtggtcgtcgggcagcctgtgtctttctccctcctgtgctttgcctcacagagttgtggtcaccaggagatcccccatttttctgcctatttgaatccttccaggccccctccycctgatgtggcgacacctctctcctcagaaccctgataatgttcacctctcttattaggttataaactctgagggcggggctcccgcattcccgtgtttagccagccgtcttgcacatggcgatattggttttgataatctaccacatcattcccttgttctcatgctgattgcttgttggtgtcagcaggttatgcctgccttattaccgcatcctgatcaggcagctggtgttcaggcagctaagaatccctcccctctataaaatgcattctgataactatggtaatgagacactgctagtagatgtcttggtcagtgatatttaccttctaagcactttatttccttttttttgttttattataggctgcaaaaatacaatttcccagaattttaagttaggggcatataagtaaatctgcttctcttatgggttaaacagagtccccagtcttttctcagaacgtagaaagaaacaactgaactacagattagcttttgggatgccacttgtttgatggccagtgtctacatgtttattgatcactccttttggtttttctttttatctagaaaatcataaatattttatcggtcctggaacagtttgacctgaagttaaagttaaaaattctctagatattcacatctttttatttagtaacatccaagtttttaagctaccttaacttgcatttctgaattgttcaaatgttatatttaagggatacctttatttctgagatttacaaatttgtccactgataataagagtcctatataactgggaggctgggaggtgctctctaacttttacctcctgatctttctcctcttgcctctttttcttttcggtattcctagggttccacagagctgagccccttgggtctaccctttgtactcttctcaccaactagattgttggagatttctcgacctatgccttcaggtactacatgataacagcttatttccaaagccatatctgtagtcgttcctctcttgtgagcttggaccctgtatccttttgcctactggcaaagccccaggtgtatctaaaattcagcttatctaaagcatgattcactgtccttcctttcaaaacctaattcttgttctgtacagcctattttcatgaaaagcactacctagactctgtctggttggcaggccagaaacttcagagggtgttgacatgtgttgggttatccaggaaacagactctgagctggagatgcatgttgagaagtggagrtttgcatacagagtgtgtgcgggagctgtctcctgccttcaaccctcccctgcaaaagtgaaagtgaaaaaaaagaaaggtatattcatcatgacacgcattcgtgctgaacccggatgcagcctcagaatccttcttaacccagtgcccttggcaactgttaccattccttggattggcacatgagatgaaatcttatcaatatctgatggtgtggttcacattgacaggtatctctataggcctctacacacaaacatcaccattaacagctgggtggcactttgctcagtgagcagaggtgagcrtttgtctagatagaggaaagaagacaagacagggaaggccaggarcattgggaggtgggtgtcaagcaggagaagcaggagtgggtgggtggaagtacatggtctcccaggtgttcctagaacgccagccctgaaatcagagacctttggtgcgaatattcttaccatttctctcatctcttttgctccaggttacgttacagtggatattttgggggtgttactgccctaagcagagagcagtttttcaaggtgaatggattctctaacaactactggggatggggaggcgaagacgatgacctcagactcaggtgaacaacagagaaaggtccccttcacggggctctgcactcastgtggctctggagacctgcatttatatttattcctttagatgccagtccagcaggtcactaggctgcagatttgggcttgaagggtgcagggggtggagggaaggtaggatggcccacatcattctgtgccagtagcagtttacttctggcctgggggcatttggggtccagaagtgttggtggaggcctcatgtacttgtcgggaaagacttactgagacaccagtgagtgagaaaccccaaactgcaaggtgtctgctgaactgcaatttggagaccgggttgttaagagcctcatgctttctgtcagaccccttggggacacagttcccagtgtccccctgcagggagtgccagcagcctctggggagctgcacatgttgaagcaggcaaagaggtcctctcctcaagcgttaggcagccctggcagccctgcacgctgtggagactgcaggtggcctgaccccaggcctgactctgggctgttgacattaccctgggttctcttggactgctttctgctctgaggggctcaaagggaataagtctggcctccacccacagcttcttcccctcaacttggatttgggggccagatagttatagttatccctgcctcccagaaataagtaattattcaagagcttaggctggtatctttagacttgtaatcacaaggccattctgggtgtcaggaggcccccttccctcctgcttgttgcctcttggaaaagaaattcttttttttttttttttttgagacaaagtctcgctctgtcacccaggctggagtgcagtgacgtgatctcgactcaccgcaacctctgcctcccgggtttgagtgattctccagcctcagcctcccgagtagctgggactacaggcgtgtgccgccgtgtctggctaatttttttgtatttttagtaaaggccaggtttcaccatattggccaggctgatctcgaactcctgacctcaggtgatctgtctgccttggcctcccaaagtgttgggattacaggtgtgagccactgtgcctggctggaaaggaaatttcyaacctggggctctgaattattagttacgtgactgtcagaaatttttttkttgcctcatcataaakaacccaggggctccatgctgctctwgttcccatgtctaggctgagagcctctggaatgtttctagcaggagggagtggattcccctgaccaggggctctacagaaatggccgtagtgatgggcaacagctcttcacagcccagcccatcagcagcctatgtggtcatggcttaggaactggacagagggtacgtgctacatttcaggacaagagtagcaaaggctagtgataaacaatccccattatcttccccaaatgtacttcactggggtgattagtagaattttgccctgatcacatatcttcagtgtcttctttcctgctaygcttcagcttcaaagtagaggggagcctccaattttgctttcatttgaaaagaccatcatggccttcagaatggtttttgactaatgtggtagataaactaagatgatttgaatatgaaagttggttgagatttactgcttatttattcgcctgtgcaacaggcactacccttctttgtacttatataatacatataatacattgcagagtacaagcatgttccatgcagattatatcatttgaatatttgaaatcaactccctatcaccattgccattttacagatgagggaactgagacctggaactgtgaactgacttactgaggttgtaaataacagagtccagatttgaacctagaattgtagctttaaaacttgtgaccataaatggccattcctttctttgttaaaagaaggcaactctaagtaaattggggatcctaacagacttgattctcctattcttcaggatgttttgaaataagtactttatcatttttttttctttttgaaaatgactaagtataaactaacacatctcctttgtaccccagtaataaatgctgaatctcattcttttttgggcttatcrcctgaagttccaccattataagaaattggaaattttagaagtttttctttttttaatactccaataatcaagctgtttgtgacactgtgtgtgtgtgtgtgtgtrtgtgygtgtgtgtrtataaattttcgcaaatgatgctttttatttgcctagtggtagataaataggatggactttaaaaaaatctctattatttttctagggttgagctccaaagaatgaaaatttcccggcccctgcctgaagtgggtaaatatacaatggtcttccacactagagacaaaggcaatgaggtgaacgcagaacggtaagtcctggcttcacctgcctagcaggctacctccctagtctgttctgtcaataaggactatgttgaattcgatcagatttgagccagttcattgtgttaaaagatttttattaagcaaattttcaaacagacacaaaaggagagaaagtggtgcactgaaccctcacgtctacagttctcaactcatggcctctcttctttccctcagtttttttcttaccccactggatttagaaatgtgtcacagatgtcatagcatttcatgtgtaactgcttcagtatgtattcttaaaatataagcaattttaaaaaaggaatcagaataccattatcatacctagaataaaattaacaatatctccttaatgtcatcaaatgtctagtcagtgttaagtacttttttatttttaaaaccagttgatcagatcagtgtctaaacaaggtccacattgcatttgaatgatctcttttaatatgtaggttccctctccctttctttatgtgttccttgatatttatttgtggaacaagccagattatttgtccaatagaattccttgcattatggatttttccaattgcatcctggtagtataacttaatatgtcctcctgacctctattttctcataaactggttgtattagtcagggttctctagagggacagaacgaacaggatagatgtatatatgaaggggagtttattaaggagtattgactcacactatcccaagatgaagtccacaataggccgcctgcaagctgaggaacgaggaagccagcccgggtcccaaaacctcaaaagtagggaagccaacagggcagccttcagtctgtggccaaaggcccgagagyccctggcaaaccactggtgtaggtccaagagtccagaagctgaagaacttggagtctgatgttcagggtcaggaagcccaggagaaagatgaaggccagaagactcagcaagttggcttctcccttcttctgcctgctttattttagcctcgctagcagttgattagatggtgcccacccacatggagggtagatctgcccctcccagtccactgactcaaatgttaatttcctttggcaacaccctcacagacacacccaggaacaatacttcacatccttcaatccaatcaagttgacactcagtattaaccatcacactgggatttctctgcatttctggagacttgaacagaatcttatttttgggcaagaattttcatttatggtgttgtgtacttcctccagtgtcacaacaggaggatgtaatgtctggttgtgtcattttgtgatgttaggattgatctgtgagtttcgatattgccagtctaatctatgcattgtgagattcctcatcagttttttacctaatgacttcagcagtcattgatgcttgatttctaaatttattatttaattaggagttgcaaaattgtaatattctaattctattgttccttctgcatttattagatttttctacaaagtactttcccttttcatgtatttgggtactctggggtatagtttttataggaaaggcagaataaagagaaaagagtcaagcactgattaaaaatttttcagactaatgacttggtgtttcctagcatccttcaggatgtagttcttgtactttttggtactcatattgtctcatctttggccaatgggatcttcttcaagctgggtcctgaatcccartagtcctcgagagcttccctccctgtgctctgctgtgatgaaatgttctaggctcttcttgtacttttcctgccttgggaattggcctattcacaaggaatcctggcagataagccagttcttatgaggctttgattgaagaatctgtatttctttgttctgatttttccccttaaattttcaaacagtcttaaggggtttttagtgcttttgttatagtctacattttaaaacaatattaaagtgcttttagcctgatattaaacagtcctgttaaagttcatttatttttttctgaggcagggtctcgctcccaagctggagtgcagtggcgtgaccatggctcactacagcctcgatctctcaggctcaagcartcctccaagctcagcctcccaagtagctgggaccacaggcatgtgtcaccatgcttggctaatttttttttattttttgtaaagacagggtcttcctgtgttgccaaaggctggtctyaaactcctgggctcaagcagtcctcctgcctcagcctcccaaagttctaggattacagcatgagctaccatgcctggcctaaagtttatattttaaagcattattaaatggcttttcacccttttggtagagtcaaccactccaacaaaatagctatttctattttctatgtttttctagtcattgtccataggtatgcatttttctctttatgttaaaaaaattaattattgagtagatacaaaagagtattcctaaattgtatgaaaagtatgaagattcttgatgccatgaacactgctgatatctcctacccccactttgagtgcatgacctgtgtggtcctccctaattctgtagtctcctccttcacatctcccctatccacctacccaagtaacacttctctgaatttttgtgataagtatttgtgataatgatagttatttctgctgtttcttggttttcttgttttcccatatgtttgtatccctaaacaaaagattgcttagttctgcatgtttttcaactttatgtaaatgaaatcacactgcatttattcttctctgactttatttagctgaacattatgcatctgatccccatccatattgtcatgggtaactagcatttattgtcttcactgctgaacaagtagaacctattcagttcactgcccacttgtcttcccagattccatggttctggccacactagtgacttctttaaatgcatcctgctcttttgcgtctgtgcatcttgcccagggtggtctctctgcctggagtgctttttccttcaccttcttcacttggtggatttctctctttcagcgttactgaaattttccttctccctgacacctcacccgacttcctcatgaagttaggtctcccttcattcatcctcatctacatacattctaatttttttggaggctcgtgaaagctatgtacccacctacagacaaactttccttataacataggaagattcagagatcccctgaagctcagccaaggatcagttagcaatggttggtacatatcctgtagtatctgtattccttgcacatccttctgtcctgtagactgggggctcactgagtgcagtgacacttttcatcatgggtccccgggttctcacgtggagtctgacacatgaatacatggctatcatgtctgtcaccttcaatggggaaaacaaactttgtaatggtaggaaacacaacaggtacaataatttacaaaaatatgtttgccacatttcagggcaaggcaaaatgcagtggagacatatgttaaattcttatcattcacatttgttcyttttatctttaggatgaagctcttacaccaagtgtcacgagtctggagaacagatgggttgagtagttgttcttataaattagtatctgtggaacacaatcctttatatatcaacatcacagtggatttctggtttggtgcatgaccctggrtcttttggtgatgtttggaagaactgattctttgtttgcaataattttggcctagagacttcaaatagtagcacacattaagaacctgttacagctcattgttkagctgaatttttcctttttgtattttcttagcagagctcctggtgatgtagagtataaaacagttgtaacaagacagctttcttagtcattttgatcatgagggttaaatattgtaatatggatacttgaaggactttatataaaaggatgactcaaaggataaaatgaacrctatttgaggactcyggttgaaggagatttatttaaatttgaagtaatatattatgggataaaaggccacaggaaataagactgctgaatgtctgagagaaccagagttgttctcgtccaaggtagaaaggtacgaagatacaatactgttattcatttatcctgtacaatcatctgtgaagtggtggtgtcaggtgagaaggcgtccacaaaagaggggagaaaaggygacgaatcaggacacagtgaacttgggaatgaagaggtagcaggagggtggagtgtyggctgcaaaggcagcagtagctgagctggttgcagvtgctgatagccttcaggggaggacctgcccaggtatgccttccagtgatgcccaccagagaatacattmtctattagtttttaaagagtttttgtaaaatgattttgtacaagtaggatatgaattagcagtttacaagtttacatattaactaataataaatatgtctatcaaatacctctgtagtaaaatgtgaaaaagctttgagtgttccttcgtgttttttattgttctttgaggcctacagatatgttcatttcagtatccataattctaaagagcttaaaaacagaacaaatgaaacaaagccctccactacttctgtctcccgtccttctgtccctctcttgtttgtctcatttgtgacctccttgtggaaccagctccaatcttacgataggcccrtccatgtctcactccctgggcctctccgtgaatgcattatgcttatcatgcaagccctaggggttctcaatccatcattattgtatgacacctcaacagttaaactttaacaagaatgagtgccagccaggaagtttaaataatatctaatccttcccaagcagggagagagggagtaggaagtttggtgctcctaagataaaacaggagttgtcaccacccaagtggggaaggagaatttgaaaggacaatacacttcataggcatgaaacgtttacctagggctagcttggtttagcttttaactcagcacagggagcaaaagagcaaaagtggttatttttcttttccttttttttttttttttttttttkygcgacagggtcttgctctatcacccaggctggagtgcggaggtgcagtctcggctaactgcagcctccaccccccaggctcaagtgacaatcctccccccgtcagcctcctgaatagctgggaccacaggtgcacaccaccattcccagctatttttttgtatttttagtagagatggggtctcaccatgttgcccaggctggtcttgaactctagagctcaaaatcaatctgcctgcctggggtgcccaaagcgctggaattataggtgtgagccacagtgcccggccatgtttttttctttacttagcagagaaatactcagggttttcatgttttttgctcaaactttgtaaaggagcttcattcttgggagatttgctaatgaggctgtagtctgttgagtaaatctctccctcactgtcccttctcttttctgtagaaactttgtctagagctctctcccaatttgcttgactatgaccatattaacagacggtaattgagaggttgtaggtccctccctcatcatggttgggaagggcaatggaagagaatggtgtgtgcaaggaatttgaagatctgtatttgagaactcaatttcttactcaatggaaatggagtatagctagtaccatgcagaaactctcttgtgtttttttgacatctgcaattttttaactgttggaaaccactgaatgatgccttttatttttcttcaggtaattctttcaaccaagataatctaaaagtcccttaaatgacttgttatggaacttcttgaggtggaagatagttttttaagaccttgacactgccattgtgacactttccctgcactggggcatcaaaggctggtgacacggggcatgaggccgcctgcccactcactgctgcctccctccctgctcttgcctccccactgggcagggggtttggcttcaaaggaactggcttcctccagttcctgccctgtgcattttctcatagttgccaaagaggcctactgttttaaatattgtagagacagctatgcctactataattgctaaggattatgtgggggcaggctatttggatatcacaactacctaacacaaagagtgtgttactttgaagttttcattgattttttttcctcacctatactggcattcatttctatagtgctttgcagtttgtgatatctttacacacactttattggtgccgcttactctttttttttttttttttttttttgagacagagtctcactctgtcacccaggctggagtgcagtggcacaatctcggctcactgcaacctccacctcctgggttcaagtgattctcctgcctcagcctcccaagtagctgggactacaagcatgcctcaccatgcccggctaatttttgtgtttttagtagagacggagtttcaccatattggccaggctggtcttgaattcctgacctcaggtgatccgcctgcctcttcctcccaaagtactgggactacaggcgtgagccaatgtgcctggccgatgcttctgactcttgaggtaagagggcagttgagtaagttgagtaagtagaggtctcagccaggagggtgccttgccaggagtctcacaggcagcaaatggcagattctgagcaaaactcgggccctttgactttcaagaccattacatcatattgccttcttcttggcttctctacttctttgtggtaattttcctgaatgtgtgtcattgtcttaattcctacagagagttagtattgtctggaccctggaaagtgcattcctgttctcagctgctctcagaactttgtccccaactccatctgtaatttttctgcccttacccccatcacttccactcaagccccaatggatagatttcctgggagccccaaaatgctctgtgaatggacttgagtgagataaaagacattttctcccagacttgaaattcactttccccaatcctattcatatatgcagtccctaccaaaaaccattaacatgttctgcaagatgaagcatattcaggtacatttcataagttctttttcaccaatcacattctataacttaaaaaaaaaaccctctatccttagtgccttcgatattttatgctatttctaccttcgttgatttttttgtatatgcataaccatcttatacctgctgagagggcctgatcattctaaaagtatacacaagggagtggtttagaggttccacccctaggaagtacacctgtacaggtaaagcctccattgttccattgataattgttaagatttaaataaaattatcaaaccttgtgtgcccatgtgtggagtgtgagtgtgtgtgtgtgtgtgtgtgtgtgtgagagagagagagagaatgagagagagatgtgggggcttggagcagaggttggtgaagggtgggacataataataaactaagtgcttgctctgtatcagtttccttgatataacctcctgattggcatctcttatagaccgatgcacactgtacgtatcttactgaatcctcccagtcctgtgtgaggagagaccagtttttctgaagcaggctccaagaagctaagtgacttgtcaaagagctgggatttggagccaagtactttgactccagagttcatgttcttaaccacttcatggtgatggataaataaatacacctacaccaggaaggaataaatacatcctatttcctagaggaaataaggattggaagactaacttggagagtgtcaatgctcttcagccaaaaccccccaggaacacattgcagataaattaattgggttagagttgatcaaagggtacaaaatttcagttggaggaataaattcaagagctctattttgaaaaaaattgggattgtgactagttgcaatcgttgcagtgagtgagaacacaccatgggggatccatgaagcaactcagtagaaggaagttagaattattacagcatttgggctttggttgggtcatttggggagggtccaagaaagggtttgctctgttggatattatcagaaagcaggggcaagtccatggttgtttatttcaataagttttatttgtagggagggagactagcaagagaataaagctgtaattgggaagacatagcagtcactaattttagccaagaaagcaggtgtttggttttttgtgggtggcacagtgaccttgtttttgtctatgcatagacaaaattatgcagtggccttggcttgcctcgttttgtcatggtctcagagtgaccctatgaggctggtattctgtgagattgtttatgtctaacaggagaatagttgagcctagttgtgagtgcctcaccagcgtctgttgctctgtagttctttttcaagaggaactcagggtagaaaccactagaaagtagggcatgacagtaccatttctccaaactccaggatttgactatttgtgtcttaacaatgtggagtgggggcgtgtgctgggggaagggttggttggagaagtgtatgggatctctgtttctcggcaaggctgcctttctctacaatgtttctggatccctttacgggatctggccacttgagccttataatacaatagcaaactcagtagtctatagctacccttctttggggttcttctttgattcagtctcacttatacaggctgagaaggatctggaagagacactagaggaaatactagacccagaaggagaaaggaaattgttccatcaatagaaatgagaaaccagcttagtttctaattcctcaaccacaacacaggttgtcagattggttggggtgggggtgtgagattgagaggaggttagattttcaagttcacatgactagtattccttttatgggtagccagaaaatatctgatcttctgtttaaaatagaagcagttcctgtttattccagctgatgtagagaaagaaaagctacaaggctgacaagtaggagcaatgggcttttaaaaattaaatgacagactgtttgcctgccaggagcctgtggagcaatctagggacggaaatggccagccaagagagcatgatgacccgcctggcgttgcaatcaagtaaaacttacccaaattagcctgacacatttttggtgttagtaattattctttgcccacctgataagcaggtgttgaagagggaagtttcacaagatagttgtgtctgggcctgtctcacactcagcaagctgccagatccctagagccaagccgcctggttcccctttgcctccctggtttgctggggctggggctggggctgagcctgggcctgcctgagcattggcttggggccacttccagtccctggagccagaaggaagaggggcaaggctgggcctccagggaaggtggagggacatgggagcaggaactgggcagaatagaaactgtcctgaggttaaaacaggagagccctgtagagggaagcacaggagtcctgaatggccagactctctgcagggtgatcctcagacctcgtttctgtcttagctgaaaggtgtgtcctcctcaagtgttggagccccaggacatagtgggtgcctgtgtttaggaccttatttggttttggaaggagcagagcctgcccccatttatagtggactttgcaccttctataaaggaggctgaggctgcaggaaggaaactagctggagagggggcagggggcagtggctcactgacggccccttctcttttagttattgcttggtaaggaagtcaggggataagatttaaggaatagtaggtgggccatcttgtcccgcaatggctctttcatgctcccactgctgtgctggattccaccaactagagatcaacctcagttatcaagaaaacgtcatagagattgagagagtggagttgagttgtcacccactccttagtatgaattggtttccaaaaaggccttcccctaacctagccgagatctaatcataagaagggaattttgctacttgggtggctgaggcaggagaatcgcttgaacctgggaggtggaggttgcagtgagccgagatcgtgccattgcactccagcctgggcaacaagagttaaactctgtctcaaaaaaaaaaaaaaaaaaaaagggggggagggaggcggggaattttgtatgtagagagaattttggagcatgaagccctggaagggaagtaggagtgggtttggggcaggaattgctcaggcagtcgggaggtgagggcactggaaagcccagtgagtggtggaggcaaaaggcaccagaacacacaggagagagtgtgcggaggaaaatgagagcacggctgtttcaaagctttgcccagaggaagctccttccctgtcctcctgtcttctaaaggaccacagagagaaccttctcagccaagcacaggtgtcatttatctcgatatc

SEQ ID NO: 95069 - DNA, 43924 bp, Homo sapiens
  misc_feature (1)...(43924): n = A,T,C or G
cactcattttgccccttggtcactgtagagaccccacccaatgcttcggacatgatctagacttatctgttcgcactgcgtttggttatatctgtccccacttgccaaggtccttcacctttgtgggccttgaggtcattgtctctaccagctggtggcctcaggcaagtgactcctctcagggtatttgagcttggagcccctgaattttcaatactaatgcccaaagaacatgagtctaaaatggggttgtctgacttggagataagagcaaagaaagaatcctttggtctcccaatctacagagctgtggatagaaacatttactaatagacagccatgcttcaaagcagtgtttctcatcattttggctggtatatggacaaccctcctccccattgtcaatgccagcagatggaagtgacacagtccatctgttggcccacttcaggggccggctgtgtcttcttactatatcttccttctaaaatacactttctattggagactgctctagtgaaggtgacattctgaggtgaggtggactctctactgtcccttattccaccagccctgaatccaggagacctaggaggggggtgctctgaaggtgtgaattttttccttgttgcaggcacatggtaattgctatgtaattaggactaagaaaaggcatgctctgtgatcttttccagagagctgccattgaaacccggctctgccaccagatgcctccaagcctcaggttgctcaggactaatgtaagttgaggctaataatgcccaccttgaggagaatggtgagaatgagagtgggtagcataaattcagtggaatgcataaggacctattgctggtggtagtttttcaaattcaaatccatgctctgccactttgtgtagccttgggcaagttattaaaccttgcgctgcctgtttctgaacgtggaaaatggggttaataatagtatctaccttgtgggattgttgtactttttacacagcatagtatctagcatataataagcagttaaacaaaaaatggaaaaagatgtgttaacatatactatctatatattattgatagcttttagaaagtgtatctagtgtcttctttttaccaagctgtcatgaaatgagagacccagggatattcccagacaaccacctccagccagtttcttatgtcatttgggaaacttttgacacarccccgggtgctcacagggttttctttctcttcaaccttctcacaatactcccttgccataatgcacacccaaagataaacccttaaggttcacaattttactttgaagttaggtgatctcagggaataaacactaaaccattgaattttagtatcaaactgtcattttaaagctacaaataatttttagccttctcaacacttgcaggcttggcatctcctgcggggtacacagcatctctgttctggcaaaaccacaagtgacctttttgtctgggctaatataaagctggtctctacttattctttctggaaaaacagagacagaatatagatgtttttaaatgaaagttaaaataatgtggtttggcatattagaggcatgaaatgttctttctccataaggttttagaccgtactgtgtgaaaagcaggttcactgtgatttgtctgagtcttgggagacagaacacctatgcatgcaatgagttacaggaatctggcttattacttacagctaggcagcagacaacagaagcctgaaattcatgtgagccagtacccaaggcttaggaaagctgcctgtggcacacggatcctcatctgcacatgcccacttgtaccacaactgaggacccccaggaaggcagcccaccctgggttttatattcaaaggaaacaagaatcactgagctaaagcattgaaggatatcgtgtttgggggtgtggggtagtcgggggactggaacagattccaggatgttggattcccagcacattctacagttattcttgagaactataagccagaaagctgaaagaaccgggcccagtccaagaccttgaaaactgtcttgcactacacttatattttatgacttgttctgagaaggtaagtgtgtgtgcgtgcacgcacgtgcatgtacccatgttcacatgcaggacatacaggacagcaggagtggagagactccataatcgtgctcttcacctcaaattggaatctggcaagattggactttctgaaaatcaggtaggataagggcttcaagccattttgggttgagcactaaaatttcatgacacattctatctgatggaattctatgcaaccttaaaagaagaatgaggcagctccaaagtattttgtttaatgtgaaactcaaggttcaaaagagtttgcgtaagcctgggcgtggtggctcacacgtagaatctgagcactttgggaggcaaaagtgggaagatgacttcagcccaggagttcaagaccagcctgggcaacatggcgaaaccctgtctcttaaaaaaaaaaaaaagaaaagaaagaaagagagaaagaaagaaagaaaaattagatggccatggtggtgtgtgcctgtaccagccacttgggaggccaaggtgggagaatcacttgagcccaggaggccaagactgcagtgagccatgattgcactgctgcacttcagcctgggtgacagagcaagacactgtcaaaaaaaaaaaaaaaaaaaaaaagtagtaggtcaaaagaagggtgtaaaaatctaaaaagcatgagatagaatatctttaggaggataagcaagaaaaccatgacaatgcctgatttctataggattgggaaacttgggggaaagggatggagatttatttttaaccatgtttttgtattttttaaaaaagcatatatgtgtagacctattacaaaatacatgttaggccagatatggtggctcacacctctaatctcaatgctttgaggttgagatgggaagattgcttgagaccagaagtttgagatcagcgtgggcaatacagcgagacctctatctctacaaaataattttaaaaaattagccaggcatggtggcaggtgcctgtactccaagctatttgagagactgaggtgggaggatcacttgaggccaggaggtcgaggctgcagtgagccaagattacaccactacactccagcctggttgatagagcaagaccctgtctcaaaaataaataaataaataaataaataaataaataaataaataaataaataaaattagctgggtgtggtagtgtgcacctatagtctcagctactcaggaggttgaggcaggaggattgcttgagctcaagaagtgaggctgtggtgagccattattacaccactgcatttcagaattttgaacattgatgccctggtcccttgctcattgtgtacccagatcctaggcaaataaaaccatctgtctccaccttacaatgggtgagtaggaccccctttctaaaagaggggtgggaactaaccagcacaccctaccagttgaacaatgccttcccctggcaaatacttattgaccactggctgtgtagcaagtactgtgttacatactgggatatctcagtgagcaaaacaggccaggactctgcccttctgaggctgacattctccttgggggagatggacagcatacactgaatatgaattgtggctctctcagtgtctccaggtaggagggtctcatcctcaccttctaaaatatgtaatctcacttttcagaaggacgaggtttagtccaataaaactcttgcatatcttgtttcgccttggccctctcaagcagtgtccctagcccctggcctatctgagcttcagtttctccactggtgaaatggacatggctattgtaagtattaacagaagactagtggttctagcatgcgtacgatcacccgaggagcctgctggaactgcagagtcctgggcccagttccaaagattctcattctgtgtgtctggggtggatccagcaatctgtcccaagtcaattggatggttgtgaggcagggggttctggaagggaccactctgaccccgcttggagagctctgtgctagatgttggatgtgaaagaaagtgaaagtgctctctcaatgtcagctgtattcatgccatgcacaagggcaccctggattaactatctctggccacggtgtgggtggctaggaaaacagccctcagttctcctgctgtagggaaaatgattgactgatggctccagctgctgtcttctgaatctacctctgtctttgtgctgaggctgacctcagctaatgactaagcaagatgtggctgctaatgcaggctcatttctacaaaacacatctgctgtcacaaaagactttggcctgaggagtccccattggcctggtcagaatattctagaaactgtgctgcagcctgagactcttcctatgtaatcctctctttcctgcccattctctttcacaggtatcagatgttcaccaccatctaaaggcgcttcctgscttctctagtacctcttattctttacaggtgttagctcgataaatctcttgcatatcttgtcttaccttggcatcttcttctccgaggacctgaactcatacacttggcttggtctctaatatcaagacagctttcagtagtgacctctgctgtgcactacttattgccacaccccttcctggttgcagcagcacttgagcagtgagatcatgtgcacaaggggatgtaagggctagcccctccaaaataattgtatcctgcgttcagccatgatgacatggtcccagagcctcttcaggagttgttgctgtagagtatcgttgctcagagcatggattctggggctggctcatcccgctttaaatcccagctctgcatgacctcaggcaaatgacttaaattctctgtgccctaccagctgtgtaaaacacaaatgtttgtatttaatacaaattacttctatcacagagaagtaatttgtacttatctgtgcttactaactgtgtaattgtcacagttaagtaatttgtatacaattataatacaaataagtaatttgttgtacaaattacttaacttctctgtgataatactcacctcagagagttattgtttggaaaagatgatcctggccctgccagtgggctgtctacctcacagcaatgtgttatgatttagggagtggggggcaagtgccctgccctctgcctctgccccattgacttgcctagaaatagctctttgtggtttctgccactctttggggtggagaggccatatggtgctggaaccatcttggttccaggcccggctctgccacttccaccaacgggatctctacaggtcattttctttttctaatatgcagtttctttgtgaattcaggaagttgaacatctccaaagttggacttgactcctagccccaagattctacaaaatgatagtactctccagaggaaactttttcttcccttcttccctttaaatggacacttaatatatagtattatctcagtcttgtgctaggcactgggtattcaaaaatgaaaagagaaagcctttgctctcaagtcactcagaatcttctagggagacacacatgtccacagataattccaacacaatgaggggtttctggccacccagagatgcaggacttctgccttggttattactaacatcctatcacgggaagtgggagaggtgcaggaaatagtttcctgatcatgtttggctcaaagagggacagtgtgtttcaatgcactctggttaacaaaaaagaaagtgtatttattttcattgagaagaagaaaccgaaaactctggcatttaaataaataaagaagaatttatttttccttttcaggtcatgaggctagttaatgattagtgaaatccacgtgggtgttttctgagaggctgggttatatgatctctttggctttagggaattactccataccagctctgagatttccagctcagcgatgcccccaggtccctgggagagctgcttctgggtggggggcctcattttgtggctcagcgttggaakttcaggtaagccagggctcaggccttgggaggaacttatttcagtcagtgatcatatttctccaactacttatgcagtactaacttttggaagatcccctaaaagccttttgcctcttctgaggtgaatttaaaacagtaggggaaaaaaaccccttttatcataatcggaatgatggtaaacaggtcacaaaacctgaactttccctggttatccgactcatttttctaaagcccacataaaaaaaccctttctcaccttgcacaagccaggaccaactgtaagaaaataaaatttggttaattctaagatattcatttttcaccccataaatatccaccattccaagatatatttaattttaaaatttaggttttccaaactaataatgattttgtcactgagattgttagatgtcctttctaatccagcaacctaactcaagtggttygtcatcctggctgggtgatgggaactagtccctgctaacctcagatgcccctgggaaaacttccctcagatgccaatttgcatttacctttcccccagtaaagaactgacccactgatccctcttgcctaacagaaaattaacctgctctactttgggttctcagaagttctcagaagactccttctcactatggtgaggtcacccttagaaaaatcccctccctctactcacaatagcaggctgcttttctgtcttctccgctggacatttaattctcattccctggctctagaatatgtcattgcttctgcctggggttgctcacatcacctttggattgatttctgttctttgcatctttcaagggggcttctgtattcctatctcccttgtactcattctttttctgctcagcacccctccctgctacaaagttccactgggtgactgcatgctctccttgcactcaygggtggtttttcagaggtgctgttgagctctgtatgtgctttctcctacctcaattagttgtccctaaaaggtgaggatttgaggcttctgtctcttttagcatagttagtgctgtgctctgtatagagcagatgtccagtgaatattgcagacattgatgcttagaggaggcaatgggctgagctgatggggaataggctctgtctgggtcgggctaacccagactggaatcctggctctgtttctttgtagctatgtgaccttgaggaagtggctttctttacctgtagctagagatgatccttaccagataggaatgctgtaaggactgaatgggatcatctgtgcacagggcctgacttttgcagttgcttattcctttgtgattttattattagcaaattgttgtctaggctgatggaagtggagggaacagggctgtcatgagccaccttggagagaaggtgggaggtatcacctaggagagctgtgggtcccgttctgagaagtgggcttggcaggcccactttgtccctgctcaggagccccaggcctccttaggggctggaaggcatttgctagttgtcctgatttgaaggttgaggagtgggaggactatagcaaattggcatcaaactctttttggaagctcatctgtcggtaagcctggggcctctgtcacacagataagagaagctcagaaattctgaaccagatagcagggttagggtcagcgcagaagctgatcaggttccagccacatatgtgggaatcattctagatgctctgggcaggaagtgggcttataataacatgttagcagggcctgggtatttccttgcctggtcttcttgcctttgtttgtctctggtgtctttcttttcacacttacccagtgaggcattctctatttcccatccgcttctcttcctttcccaccttaactgagtgtttcactgtcaacagcaacaatatttattaagttaatgttccttattcttacttttagtagtgctgtctcagaaattaagtgagttgatggataggcagagatagaagtgtgtgtgcgtgtgtgtgtgtgtgtggctgggagggatagaaatatgccaaagggaaaaggaaaaaggatgtaattgacttcagacagcctagatgaagtaggtggacagaaagaagatgccggatgcagagagctcaaggtaaaggaaaggaagagctcaaatgatcgggagggaggaggttcaggaggtatccaggtgcctgctgtcacacaagggcagtagctgacccacatgggcctcttggaagttcagcctccactcactttcctggctgtgtacccacacaatctttcatgacaaccccagtcacacctagtttttccttggactgtggagctttagattgttgagctccttgatcaacctggcccttgagcttccaggctggctcaggcgtcctctcctccaggtggatgcacaagtcttcctccatctggggtaggtggtctttctttgtgttctctcagtacctatgtttcctggtcacagatcttacatccctatttgctgtggggcctgcttattttccctttctccgctagactttgagctcccaaagggcagttatggctggcgtcttcttcatccttgaatccccagagcctcacccaggcccaggcacacaggacacattcaataagccaaaagccttggtaactgagaagaaagaaattgagcgggctgcagtcctcatctctacttcctgacrttaggcagattgattaaatgacactcatcctgaaacaattcagccaaagaagggttccagagggtggcccatttcagagacactcctggctgctgatgcctcaatccacaggtcatctgatagcacagctctgtctgtggggagcccagggctcaagggggtggcaggaagttcagtggcccatagtgctgagctggtggcagaagcagcctgtgacaccagcctctgtaaggccagcctgggcctgaaggtggtgctgcaccctgcatgcgtggcagagccaccctcaagtcagctaytgggagggggcctccgccctcctcccctcctgcagtgtcttcccgaggagcctggaggagggtgcctgcttcccgacacatgcaccgatggctcctctgtcatctccacatttgataacaaagtgtctgatgtggttttgtgccaactctgtcactgccagaacacccttcccttcttggtccaggccacagaatcaaaactgttttagcaaaataacacttctacgaaacaaaagcccatgggggataccgatctacagaacacacctgagacaggtgcaggtgggagtgcagagtagcacatttccagcatttgcagatcacagaggccacccatgggaaccatgagcagcccaggcgggtgaagggagctctgtcatatatgcctgagagtcactttccattatggaaacatgggtgttaccaggccttactcacccttctctaacacttcttcagtgtcaaagactcaagaatagaaaactataggctattttcagactcagacaagccagtatttcattctgcacccctcatttctattgtttataaatctctggtcagcctggccagatactcatgtgtcactgttctttggttggagtggtggctaggtagaggcagtatctgaatatgcttccctatttatcagcttcaaatactggcaattttcttctctcccttttcaaactttataacttttatcccattgcattgtcttgtttcagtggttaggactaggtcctctagcacaatatttaatagaagcagtgatagcagacatttcttatctgttccctgttctaaatggaatacttctaatatttcccagtaaatctaatccttactgtaggcttttaggagatatcctttcttatgttaaagagggttgaattttgtcaagtgttctttttttctgctcatccgttgagatgagcatatggtttttcttctttagtttgttcatacgtgaattatattaatactttttttaatgttaaaacagcctttaattctttgcaaagaattggcccagcaaaccttgctgggccatgatgtactttgtggtcttgttatcctggatggatttagatttgctgatattttatcttagatttctgtttatgtttataaatgaaagtagcctttagtttttccttctcccctgtcctttgcacttttggtacttcggatattctcatagaatgaactggaatcctgtctcccattttctattcctggaacagcatgtgtaagctagggatcaatagaattcctctgtgaaactctcaggcctcttagacttttctgagggatagttttgaaactagtgtttcaattcctttatgctatagttttacatttgattttctgtttttcctttcttgactaagttttggtaagttacgtttttctaggaaatgatccattttctagcaaaatatcagtattttcagttttggggtggatataaacttttttatggtgtaaggaaatctactgtctgtatttatatmccttttttattcctgatattgtttacttttaacttccctttgttctgttactctgtcttatcaaaagtacatctagctcattattcttttcaaagagccagttttgggtactggctctttgtgtgtgacaggtactattttaggcagtagagtgaacaaaatggattttaaaaatccctgctttgttcaaaagtacattctaatgtggactgaccactaatagamaataagtataataacttggcaaattccatagtagattagaaggtgatgattgctaacaaataaatagaccagggtaaggatgattgagagaaatgargtgaggaacacaagcaggttacaactgaaataggatgtgagagtagacaagagagcacttgacaagcaaagacttgaaggaggggaaggaactgccatrtagatacataagggaaatgcattccaggcagaaggaacagccgggcaaagaccctcaggcaggaagccatctagagtgaggaagggcaaggagaactactggctgcaatagtgagtgattgtagcataaggcaaaggactcttggagtggggtggattagctcagttagggccttacagtccattgtyaggacttcaggtttcaatctgagagaaaaggcttggagacttttgcacagagatgtaacatgacttgactgacttaaaaaaaaaatcgtgactgctgtgttgcaaatagactgaaggggccaaaagagagggcaagaaatgcagttgcaggctatggcagtggctgtgagagatgatggtggcttaggccaaggtggtgagaagggttagattctgaatatttcattctgatggtcaagccaacagaacttaccaattgtatgtgggatgtgagagataggaaagagtcaaagatatcccaggcaactttgcaaagcctgagaaattgtaatgactaagttgctaccaatgttgctcatatttccttattttctatttcttcaatttcaactattacctttatatttctttccctatattttatttggaattactgtggtattcttttctgagttaaaatattagcttatctaatctaagtctttcccttctcccctcccccaccaacatttgcatgtaagttacacatttttccctattaaaaggtaaacttaggcacattaaaattttaaatagtttatttgaacaaacagtgatttatggtttgggctgcttcrcactgcaagtggctcagggctccaccaaagggatgtgaagaataaattttataaggtgcctatgaatgaagcaaggcaaagaaaatatttgattgattaaagtggagcagtaccttaaggtccctagtcagaggttagttggaagcttctgagtggtaaagcttaagcctcagtttcctaggacacagctcttcactatgagttggggtgtggtgagcttctgtaggaactcaaccactagagcttcctcagtctaatggcttcccaaagaattattttaacaacccaagtgctgttttagccactctttgcaagttttgatatgtgctggttttattgtcgtttagtttttaatattctgtacttttcattgtgattattctttaacccatacattccttaaaaggttaaaagggtgtttttctgttggtaggagtgtaaattagtrtagccactatggagaatacgatggaggctcctcagaaaactaaagatagaacttccatatgatccagcaattccactactgggtatatatccaaaagaaaggaaaggaagtcagtatatcaaagagatatctgcactctcacgtttatttcagcactgttcacaatagccaagatatagaaccaacctaagagcccatcaactaatgaatgaataaaaaaaaagaagatgtggtatacatacacaaaggaatactattcagcctttaaaaagaaggaaatcctgccatttgcagcaacatggatggaactggaggccattatgttaagtgaaataagccaagcacaggaagacaaatatcacattttcacacatatgtaggagctaaaaaagtggattcatgatgatagagagtagtagattgtggctctcagaggctgagaagggggaaggagttgggaatgaaggggagaaaagaatatacatgtatttattaccactgaactgtacacttaaaaaaggtaaagatgataatttatattcttttacctgaatataaaaaatttttaaaaatcttgaacaagcttcagcaatatgtgtccatgaggaattgtgccaaggagtttctctttgtaatgggctggtaaaaataccacaggcacatgggatgggcttgtcctattgtaaaaaaatggagggggtgtttttacatgtccaaatgtatattaaaataatttttgttattgatttctagttttattacattttatttagatgatattgattctttggtgattatttgggcctgctttgtgacatattatgctcatttaaaaggactcaaactctctgatggatgcaggctgccctatatgaacaatagagcagagtgactcattaatgtggtttgcatctcatgctgaaacacagtcttttcatcttttytttaaagagccaaatgctgggggaggctgataaaatgatggagtcaggcattagctctctcatgtgctgtgggagttcaagccacaggctgaagagcttagggccggcactctcagagtgggcttcatcccaggagcctccaaacctgcctgcttggtctgcctctgcaaggggattgaggacaaagtctggggctcagaagcagtgatggggaaacctctagtctaccacagcgatgctccagaaggcctcatggcttgaggtattctccacaggtggggttcccacaattcactcatagcaccatatcccagagcatcccagatccacactcctgttgtatatgagctcccagttacctctgatagaagataatcactccagaaatctaaagttactgtcttcctcaacaaaggggctcacacaaaccgaagtctgcaatctggatgtctcctctgaacctctgattctgtgaatcactttgtctggtggcagcaatgctgtgtgggactgtgttctgcgggtcagcatgtaccctgctgctcctgccagtctccctttgggatgcatggaagtcagggaccacacctctgcatcacagaagtggggatcggggtgtgatgctgggtgctgaaaatgggccagattttcagctccctgggaagcaggagtttcatgttgccttttctgttcagtgttttttaaaggcctgcagttacctttgccagagaatttccattgtaaaggtatctattgcaaggtgctgtgaagtaggtgagacttgtcaaggctcttctctgtcatcyatctaggctatgggctgggcactggaaggctatggcagggctcttgactgctcataaggacaagaagtgattaggtggggctaaagagttgaaaatccttccaggagggagtgttcagactagactgaggctagtccgcagggcarctgttcatttggctgcccagggttctatttagaattctctactagtttgctagggataccataaggaagtgccatggactgggtggctagaacaatggaaatgtattgcctcacaattctggaggctggaagtctgagatcaagatgttggcagtgttagttccttcagggcaatgagcaaaggatctgttccaggacactgtccttggcttgtagatggccactgtctccctatgtctttacaacatcctccctctgtctgtgtccaaatttcctctttatataaagataatagtcatattgatttagacccactctgttggcctctttttaacctttgtgaagaccccatctccaaatacagtcacattctgaagtattgggggttaagatttcaacatatgaattttgggggatgagactcagttcagcccggaacaacagccatttcaccatggcctttaatctcatctagttgagcaatattccttctctgctattttgtccttaggcatgaaaaatattcacacagcttcattacagaagtgatgaaggctgtaataaatgagtgattattgcactagctgatgtataataaaccccatgcctgcaggcccctgtttcttgcttccttccaaggtcntctttcttccttctaagaacagatgacctcaccttggatgttgcttgttttgttttgttttcctccaggggatgcacctcctaccccacagccaaagtgcgctgacttccagagcgccaacctttttgaaggcaccgatctcaaagtccagtttctcctctttgtcccttcgaatcctagctgtgggcagctagtagaaggaagcagtgacctccaaaactctgggttcaatgccactctgggaaccaaactaattatccatggattcaggtgggagttaaataaccaacaggacttctcaactaagaatgatcaagtaaccataataccataagaagttagtgggcaacaaggngaggaatgaatttaccaatggccacatgttccatccctcatatcctgctgtctttgatggggtctcatgtcaacatgcacacatggtgttcattcttattggtcatatatgttacttctccacccagtcttgtctacacactcacgaacagtacatgtctgtgactggacaaatctccgtacacagaacctttattacccaggattgtatttcccttcttcacttcttccttggttttatgacctaagaaacttccatttatgggtgctacttccgtcatrcccagaggttatgggtgtgatggagctatgcacgtctcttcttcaatttctctgatactctccagtccacaatttgttgtaatatatagtcactgagtctcaattccaatcaccatcctttctttgaacagcttttctccaaagcccatctatagggctagaaacagagaaaggtttctgggaggaaagagggagagaatatggtaaagtaatagcactatggagcaagtagagttggggcacccaatgaaaaggtagacacaaaggctgtgcacaaaggaccaccatttcctgatctctggcctgtctccgcctctcaggtccctggactccagagactcagctacatgtttccttaggcatctctccttgctcttgtgccaaaccctctcctctagcacatctcatattccaccactttccaaggctgagtgtgtacctccaacccaggggtagctaatagaggtggagagctcatcaggcaaggcactctgtctgctcttaaatcccacaaccccattccctggcacacacccagtccgcgctcctctgtccacacgagtgtgctctctttgcttctatactgggagtcatcaaaaaacttatttcctgatcccaatctgttgggaaagatttctaaacatttttctatcattttccttttcctggaaaagtcccactatacagtaagttccagaaggayagggactatatcttatttgtctttattttttggaaagcacctagcatactgcctggcccataggtactcaataaatgcttgctgaataaatcagtgggtgaatgagagaaagaaagggagaaggaaggaaaaagaaagagaaaggaagaaaggaaaraaaagaaagaaagaaagaaagagagagaaagaaagagagaaagaaagaaagaaagaaagaaagaaagaaagaaagaaagaaagaaaaagaaaatgtccacaaagaaagagcctatattttagaatgagaattaagatcgcaaatcttaactctagggcataactctagggcatatttcttttccacaaataacacaaatggagcaatgcaatgtatacagtttatgtggtttatgccttgtgcaaaggtgcctgacaaaaggctgatgaggctgamatccaagctaagttctgaaccctagcatgaggctgcatctgcctggaacaaaaggcaaagttttataatttacacaaagactgcatatgtgctggcggaagggctggcaactttggaattgtgtcctccctatgctccaagtactgtgtaataaastcctcatatgagcccttctctagttttgatttcttttctgggtttgagattaatagaggtttccatgacaatgaatatccacttggcaggtaatttttccattcttttttggccccctgtctagggttttaggaacaaagccttcctggattgacacattyattagaacccttctgcrtgcaacgaatgctaatgtgattgccgtggactggatttatgggtctacaggagtctacttctcagctgtgaaaaatgtgattaagttgagcctcgagatctcccttttcctcaataaactcctggtaggtgcagaagagcttagggtgagtttgggctgcgtatgaggagagagggtcagaaagacaaaagcactgcctgaggaggcttagggtggaagcagagtcaccaggtagctcggtggtcttgggttcaaatcttgactttgccactcacagcactgacctcgggcagcttattgaatattctgagcttcccactgctcctctgtaaaatgtgtcgtggcactttagacagcgaatgcagatggcctggcacttagttgtccctcaagagagaatggccatggtcgttactcacatactttgggcaccaaaaggagagtaagggggttgtcagggtggggagcccaggaagagaaaaagtgattaacaatgagagtgctgtcctttttccctscaaagtaagtgtggtgggtgtgtcatgcccagggcctcggcttctgaagctttgggggaaagcctgccactgtgaagccagcagactctgtggcccacggggaactyactgttcctgctcttctaggtgctgggtgtgtcggaatcctcaatccacatcattggtgttagcctgggggcccacgttgggggcatggtgggacagctcttcggaggccagctgggacagatcacaggtaacattcctccctgcccatcctccaggctttagagatagagaaagcttgccctgaaaatatctcttctaaagcaagcagaggggagtacagagcctttgttctcacgatcaagtcacctattaccactaaaatttatttattgtggttcttttgcataaaatggtattgtgttattattgcatgatttctaatatcaatgtgagaggccatgtatttcttcttttactttttatttttaagtttcttatttaaaaaaacttttagattcaggatttacgtgtgcaggtttatkacatgggtgtagcatgtgatgctgaggttcaggtttctaatgatctcattgcccaagtagcaatcagtacttgataggtagttttgcaacccttgtcccttgcttttcctcccccttttgaaatccccagtgtcaattgttcccatctttgtgtccatgtgcacccaatgtttagctcccacttataagtgaaaacatgcggtatttggttttttgtttctgcattaattggcttaggaaaatcacctccagctacattcatgttgctgcagagaacataatttcattcttttttatagctgtgyagaattccatagggtatatgtaccacagtttctttatccagtctaccattggtkggcacctgggttgattccaagtctttgctattgtgaatagtgttgcaatgaatatactagtgcaggtatccttttggtagaagaatttcttttcctttgggtatatatctagtaatgggattgctgagtcaartggtgattttatttttagttctttgaggaatcttcagatcgctttccatagtggctgaacttatttacattcccaccaacagtgtataagtattcccttttctctgcagccttgccaacatctatttatttatttttcacttttttataatagcaattctgagtggtgtgagatggtatatcatggtgtgatgattagtgatgttgagcattttttcaaatgtttgttagccacttgtatgtcttctttcaagaagtctcttttcatgtccttcaccctcattttaatggggttatttgtttttttcttgttgatttgttcaagttccttatagattctggatattagtcctttgtcagatgcatagtttgtgaatattttcccccattctgtaggttgtctgtttactccattggttgtttcttttgctgtacagaaggtctttagtttaattaagtctcacttgtcaatttttgtttttgtttcatttgcttttgaggacttggtcataaatgctttgcctaggctaatattcaggagagtatttcccagattttcttctaggatttttacagttcgaggtcttacatttaagtctttmgtccttcttgagtaatttttgtatatggtgagaggtaggggtccagtttcattctcytgcatatggtcagccagttttcccacaccatttatcraatagggtatcttttcctctaaaaaaagtgttaatttttgtcaactttgtcaaaggtctgacggctgtaggagtgcttctttatttcaggggtccctattctgttccattggcctatgtatctatttttgtaccagtaccatactgttttggttactgtaggcttgtagtatagtttgaaattgggtagtgtgatatgcccagctttattctttttgcttaggattrccttggctatttgggttctttttttgtgccatatgaattttagaatagatttttataattctgtgaaaaatgacattggtaatttggtagggatagcactgaatctgtagattgctttgggcaaaatggatattttaatgatatttattcttctaaccctgcatagaatactgaatactttggcaaatactatgcaaaaagcatagaatacctttccatttgtttgtgtcacctatgattttttttttagcagggttttagagttatccttgtacagatcttttgctgttttggttaggtgtgttcctaggtactttatttttgtgtgtgactatcataaatgagattgcattcctgatttggctctcagcttgaatgttattggtacatagaaatgcaactgacttttgtacattgattttgtgtcctgagactttgctggagttgtttatcaggtctagaagtctttggtcaaacctttagggtgctctagaatcatatcattgatgaagagagacaatttgacttccgcttttcctatttagatgccttttatttctttctcttgcctgattgctctggcaagcacttccccttttatttctttctcagcctcactttctacatctgtaaaatggttgtaacagcccacatctccttggcccactgtggaaataaactttagacagttttgttatatacatgtaaaagtgtggaggactttatgcttccagagccactctcagttaataagggactggagttgtgtrgcaaaaaccctcagcttcctagccttttggtgggataattttgggtcttgttttacagaatctcaaagaggtgcccmattggggtgagagcmcatggggataacctactcactactattttcctttattctctgacctattttccyactccctcaccatgctttctgagactttttcccaaatctactttgaactcttgtggcagggtctgctttttgtagggggaagggaasggatccaaactgagagatgggaatagtagtattcacagtaatcactgtgttatgatgaggactagagtgtgtaaaactgcccggcataaggcctggtacatagtaactgctcgaagaaatttagctattgttattactacatgaaggtagtaacaagctttacattacattaacttctatcaaataattggtgttatcaaggtcatctttttttttttgagatggagtttcgccctgttgcccaggctggagtgcagtggcgcgatcttggcttactgcaacctctgtctcccgggttcacgccattcttctgcctcagcctcccgagtcgctggaactacaggcgcccgccactacgcccagctgattttttgtgtttttagtagagacggggttgcaccatgttagccaggatgatctcgatctcctgacctcgtgatccgcctgcctcggcctcccaaagtgctgggattacaggcgtgagtcaccgcgcccagcctcaagctcatcttagagccagagaaactgggtcattgagaggttacctctagagagacaacagagagtggggtttcctgaggaaggtggtcctcagctaattctcccaacccttgggtcttttctgggagggtctatgatctgcactggaagggtgggtgtgtggtgggtccatgaatgttcctgcagctgagaggaaagaggtccctcatatcagtctcttctcacaggcctggacccygctggacctgagtacacsagggccagtgtggaagagcgcttggatgctggagatgccctcttcgtggaagccatccacacagacaccgacagtgagctggggtgaccttcctgggatgagggaatgagctcaaggcagcgcctaggaggctggcatctagctctgtgnccctgggcagagatgccctgaccctctctgagcttctgttgcacagtgaagagtttaccaaaatgctattgaaagtctcttccagctctgtctctgaccactgaggtgaatggttgtatttttagctactgtaggcaagaggattctcatttatagaccaaaagtatttggttatgagcctcactttctsattcaaatgaatgcagtaataacagtgtgctgagcagtactgggtagggcattgctgcctggctgacttacgggaaagtcatgaagattttttaggatgggtgtgcctggtcccaaggtactgggccattccactccccaggcaggcaggcctgtcacaacttccctcctccccagatgacaagcttggcccttcagtccagtggagaataagaatctctcttccgggccgggcacggtggctcacgccagtaatcccagcactctgggaggccaaggcaggtggatcaggaggtcaggagatcgagaccatcctggctaacacggtgaaaccccgtctctactaaaaatacaaaaaattagccgggcgtggtggcgggcgcctgtagtcccagctactctggaggctgaggcaagagaatggcgtgaacccgggaggcagagtttgcagggagccgacatcgcgctactgcacgccagcctgagcgacagagcgagactctgtctccaaaaaaaagaaaaaaagaatcccttttccaatagtgacaggcacaggaaagactccccatctctcaacccgttatgaccaaattaagtccttctgaccagttgggaaaggcgggggcattcctcttcatgtctgctccacggcaaatgcctgtggggtctgtgcttagtgtggtgggtkcagggagaaataacatctgtccctgaccagacaagcttgcagctcaagttagagatgtccacatctcatttcctgtggtcagaagcctctttttagcatttaagactcatgattctgaaagaaacacatgcagttgtattgtccaacccttcttcccacctttatttcacagataggaaaccaaagcccacaggcctcttcctagctatgttaggtgagttaagcttgttcatttaaaaagtgaatcctggtcgggcgtggtggctcacacctgtaatcccagcactttgggaggccaaggcgggtggatcacaaggtcaggagatcgagaccatctgggctaacaaagtgaaaccccgtctctactaaaaaaaatacaaaaatttagtgaggcgtggtggtaggcacctgtagtcccagctactctggaggctgaggcaggagaatgccctgaacccaggaggcagagcttgcagtgagcggagatcttgccactgcactccagcctgggtgacagagygagacttcgtctcaaaaaaaaaaaaaaaaaaaaaaaagtgaatcctttctatccttaaatttgctaaatatgtgacttattaggtacccatttacctaagcaaggcctctcaggccccttcaaagttggagcctctccctgatgtgacttaaaaaaaaaaacattctatttattcaatcaatatttattaagctacgtggcaggtactgagaatatggcagcaatcaacacattgaatgaggtccctgcctacatggagcttacaggctacgtggactgtaggagtcatgaagggaagcccggatgcccattagagagtgtctgcagtaggggtccgggtgagagatgatggtggcttgggcaaaggtggtggcagtaaagacagagagaagtagacagattcaaaatatgttttggaggtagagctgactagactcatgatgggctgcatgtggggtatgagggaaaggcaagactcaaggatggcttataggtcattgcttaacctccaggtcgatggcagtaagcaaataatacacaatcaatttcttccaatactgacagatgacagaaggagaaagtcggggtcttcagcagctgggcctgagccagtctgagggctcaagtctgccacagcagagggtccaggaattggtcacagggacagaaagagggcagaggatgctctcttatctccgctctggagccatgttctatttccactcagtcaggagagcacaaaagatatgtttttggggagactgtggaaatgtgaccccatacacatttatctgaactattactcaaaggaaaaccaaaactactcaatgaggaaayttaccaagtttataacatttactgagttacaaaaacttgtgttacaggatattkttcttgattttcttaggcaaatatgagcatcttaccaacagaatctctttggttccttttagcatgaaaaatccctttagaaaactgggaggctgaggcgggtggatcacctgaggtcaagagttcaagaccagcctggctaacatggtgaaaccctgtctctactaaaaaaacacaaaaactagccgggtgtggtggcatccgcctgtaatcccagctactcctgctgaggcaggagaatcgcttgaatccgggaggcggaggttgcagtgagagaagatggcgccactgcastccagcctgggtgacaagagcgagagagcgaaaaaagaaagcctcagaaaaaaaaaagaaaaagaaaagaaaagaaaagaaaagaaatctgtctgagggctcatcctgtgaagtctcacagcacttagaagtgacgtggcagagagtgggtgggctcccaaggtcagagtttgaggtccgctgtgagccgaccccctgaagtaaggaagttaatggagttgtgcctcctttcagatttgggtattcggattcccgttggacatgtggactacttcgtcaacggaggccaagaccaacctggctgccccaccttcttttacgcaggtcagaaagccagtacaatctggtatttggcaaccccngagattgaaattcaccaacagcttttgtgttgagtcagccagagtgggccatagagggtctacttgacagtgtcctttgctatgtcccataacgctttactcagaatgtattcaaggatggatgtcttcagagcccaggcatttgaggggagggtgtggcacagtccacaccaactgcatcctctacagagccttgctgtggcagaggcaagccattgtgcccaaagctggtgagcagaaggatcaattcactgcccagccatttcaccatatttaccaactcaaacagtyctctaaaattgttttcaagatgatctttttgaacacattcaatgactgtacatttcctctctttaaatacagccttctggaatttttaaaaatatatttattgatatattcttagcagactaaatttgtcaaaatctaaggtcaataattatttggttttcttatatcttatgaatatagccaatatatcagaatttcatataaaaatttaaaatgctgatttctgtttactatgtttttagtcttttcttgctttaccaaatttctaacattttaaggattcctttgacaatcttattgaataactactgatctattttaccaaatttactagttttccaaaaacatgcttcttttcgcaatttgcgaatttctcagcaattctgataaaataggatagtttggtttcaatggcttttgaagatttggtggcatttcaattgaccacttttcattttttcttcataacacaacttgagaagggtttagtttgtctctgccccagctccctgttgcaactggagagagcttggccatacagagtgtcccaaccacaggggaaaggaaagtcaaaatattgcttggccttggttgcaggtctcagcaacgaggtctcaasgtgcagggagagtttaaagaccccaggaccctggagttgtatacagctcaccacatacttcttagttccagccaatttatccaatgttgaatgctgcaaacttaaatagtaaataacagtgaaataagttttggtaaactgggatatttgacaaattcggcatatcagtcatttggcccggtgagcctcagcacattgggtgtagagagtgaccacaaacggcggctgatgcagcagtctcactgctgggtagggtataatgaggttgtaaaaaattggttgtatggctgatgataatggaggtaaaaatatgcacaaatacccattttgagaaatggggcagcatcatcaactctctatatattcccattttatgaaggagagtttgcatgatcatataatccatctcaaggccaggtacggtggctcacacctgtaatctcagcactctcggaggttgaggcaggtggatcacctgaggtcaggagtttgagaccagcctggccaatatggcaaaaccctgtttctatgaaaaatacaaaaatttgtgaggcatggtggtgtgcgcctgtaatcccagctactcaggagactgaggcaggaaaattgcttaaacccaggaggcagaggttgcagtggcccaagatcatgccattacactccagcctgggtgacagagtgagattccgtctcaaaaaaaaaagaaaagaaaagaaaagaaaaaaaagaatgcatctcaaatcaagcaattttcttgatggattatgcttatgtatctcaggaaaagtaaaatgaaaaaagtagaatgtagtaaccatgtacactaatattytgaaaaagtgatttgaggggactcccatgcatgtatttacagcttgctggaatataaaattcaatagagtttcactaaacagcatagatttccatttgtcttgactgaaaccttggttgtgttttttctctgttcaggttatagttatctgatctgtgatcacatgagggctgtgcacctctacatcagcgccctggagaattcctgtccactgatggcctttccctgtgccarctacaaggccttccttgctggacgctgtctggattgctttaacccttttctgctttcctgcccaaggataggtaaagtgctacccctttgacttcctttgacaatgtggggaagttcaagccctgctagttgtcccctcttaatgtcctgatgtcctayggtcaagaattctatccaatttgggaaaagaaaattaagcaatgaggtgctcagcctgttcttacttggaggtggayggttggttctcgtgccccacccctcactctctatagtgttccctatggccatccttgccccacacacacccttcccacatacaggttcctccactctcagaccagatgctgcctataggtctttctcacttctggccattctccagttcttcatagaccctaaatctatgacccttcatagaccctaaatctatggtggggaatccctaagagtggaacacaagacctacattacaggtcggatattctggtggcctcgtgagagctggggggatgcctagttgctggaggacttgggcaccttcctggatgatccaggccagtctggggaaaggatgccaggaaggctgcaggatctggcctctaactcacttgtgtagatcattgctatgcatatcccgtggttatccaggatgaagagctccaggaaaaactcctgggcagtggaaatggtttctctccctcccgcactctctcacttcccgctacccctggctgccactcaactgcagcagcctgtcastgcttatatgagtgaaatgggtaccagcttgacaaaatagtaaagtagggtagcttccaatgatagaaccagtcatcattatttcctattcattgtgcatatgtcagtttcccctagatgccatggacccacagacataacagccacctcacactgtctgcccagcctcatctctcactacactttctcttgcactgaacacctggtggtgctaactacttgtacttccaagtgtacatcgggcttcctcacctgtgtgccttggtcctaaccatactctcttcccagartgccctctcyccacctgtcatccactagtcttcaggtcaaacacttcctgcttcaccatgctcccactgcacgggatataaatgtcatgaaaacaactactataggagattggttttgcaagttagagacagattagtgtcagatttcttataataacctgccaagaatgagtcagatgatctgaaaagcatatttccgtttatgtgtgtgtttactgcccactggaccgagttgctgggatcccaggactcaycttagaatacagcacatagtgygtgtatggtgtagatgtccgtggaataaatgggtgcatgaattaataaacacgtggctgggtgctgtgggaccctaagatagccttctcaggactctgctgtctttgcttctttatttccaggactggtggaacaaggtggtgtcaagatagagccgctccccaaggaagtgaaagtctacctcctgactacttccagtgctccrtactgcagtgagtagggggaaatgcatgagctcagctctgccagggcaccaccagaggagtccagcccagtgtggtagcctgggtgggagtgaatgataagagcaaaggcatcaccggaggtgtggcaacagcccctggtctgaaccaaaactttcagagtgagtccaaccgattgctcttcagatgaggacttgggggcttcttactgtctatctactgatcgtatttcctcttaccctcaaaatttaccctctagtgggtcttctctctcgagtgatgtttaggagtgtcctccggctgcctcctttctgcactctcatttcccacttcttggcgcccaccctatgtggttctcaccctggcagcctccaaggttggggtccctggggaatactgaacctttccctctggtctccttccccttcacagatgcattccagcttctcactgttgctcctaaccrtggcatttccttgaagctaggatgctggtgattgtaacgatgttaaatgtgaartaaaaatgtgtccagaatccatgaaatacattacaagctaaacygtcatccttccctatgctatgtgcatcttaactagggtgactatacttcctggtttatgctggttatcctggggtcctgtttgctttatcatgtgtacaggataaagtatgccggcttggatgataaacaacatgccacccaattttaactgattttctgatcagcttgtgtcaagtcagtgcagggatctttgtgaaaatatcttcctggtaccagaaggcctggtgccatatgacatggagcctagagctcagactctgtgttcacctggacctggattcaaatctcagcttctccacttaccagctgtgtgatcaggarcaagttatttaaactctctgaactctatatccttatgtgaaaatgggaaccataacagtacctactttaaagaaccaattgtgagtataaaataaaatggtgcacaggagatcactagcacagggactggaacccaatcagtaataatttccttcccttagtcaatcagagaatttgggagaagaatagttagggtgtttgtatcttcatgccagagaaaatttttggctacctcttaggagcaaagtggactacagagtcaactgtgggcttttcatgtccttatcagctctttcaacaacccaactgggagacttaaggaaagggaagctctgagagaccaagtggcatgcccaagtctccacagctggatgaaaaggtcagaactcaactccaggtctcctgactgtaaactctrtactccttcctcaccaccaccatgcttccatcttctgagaacctgctgtccgcaggccgtacgtctcagctccccttctgtcagcgccaccccatctgagttggcatgcgggaggatgttttgtctggtggtggaggtggtgytgccaggaccagatgtcctgacttctaattccagctgctgggcagattcacagcaacctgagctggtgcctctgtgtctgtgcagctaagaatatacccagcaggaaagtgtggggaatgcctggagactaacagcatgttaaggtccctgctgagggggttcacagggccatgytttttctgactcttttgtatttattgtgagaycacctccccacaccttcagaagcgtagccctgttggttccaaaaccacagaggggcacataaacaggcatgctctgccttgagctgtcacttctagggatggaagcggagtcctycctgctctccctggacagatatgggtagggagggggtagggaccagcagctctccagccactctcaggccatcatggcactgggctcccatgcctagcactcttggtctgctttgacttcagcaatgttgacctgtgccaggcatgcgccagcatgggcagargatcttctaccaaataataatttttaaacaatatattccctcatagaacagtttttcacatagtgtaccttttctccattacttcactccatccttaccatgtcctgtgtgataagttgagggctatggcttgcagatgagggaactgaggcatggagaggctcagtgtcttaggcaaggcagcatggcttgtaagcagcagggttgggccttggatccaggcctcctgaccaaccactcaggactctgtgttgtacgacatgagacatgttcctgtgcagatttgattccactaattcccacccacccaacattaggcctagctcccttggggcctccagggtaagtgaagaaagaagtaggccaggtgcagtggctcacgtctstaatcccagcacttcgggaggctgaggtgggagggttgcttgaggagaggagttcgagactgcagtgagctgattgtgccagtgcattccagcctgggcaagagagcaagaacctgtttctgaagaaagaagaagaagaagaagaaggagaaggagaaggagaagaagaggaagaggaggaggaggaggaagaagaagaagaagaagaagaagaagaagaagaagaagaagaagaagaagaagaagaagragacagaatcttagaaaactttcttaatcaatgatacttgctagcaaaggaagaagtattaataatataatatagcaaactcagccctgagaattaaattcctaaagcttctgtaagttagctattttttccacattgcaaatatcatcctttccagttcagcccttgcccgtccccataacaattgatatcccatagtaacatctgagaaggagagacagacagggtgtggtataagatgtcctcctctgtggaggggaagcattcaaggcccctttcttcttgtgggttcttggcatcttggcaccttttggtgagccctgttcctaaccccagggagctcagatgggccatagcactccttcaacttagtgckgagttcacctgcatccagtttatgttcccttccccaatgttagcccataaaatrtggcaaatgagaaagtacaggtagagtagaggcgaaggattgcatctctagctatgttcccatcaccaaaggagcctgggaaaattccgagactaaagtgattgcaaaatgccaccaggttgcacctaccccttagtaaaaaaaaaaaggacagtgtgttagggaaactgtaatctttcttttcttatttatttatttatttagagacagagtctcrctctgtcacctaggctggagtgcagtggcacgatcttgactcactgcaacctccgcctcttgggttcaagcaattcttctgcctcagcctcccgagtagctgggactacaggcatccaccaccacaccctgctaatttttttgtatttttagtagagacggtgtttcaccatgttggccaggctggtctcgaactcctgacctcagatgatctgcctgccttagcctcccaaagtgctgggattacaggcatgagccactgygcctggcttttcttaaaatttttaattttgattttttttgagacagggtctcccactgtcacccaggctggagtgtggtggcacagtcayggttcactgcagctacaacctcccatgctcaggtgatcctcccacctcagcctcccaaatagctgggactacaggtacacaccacatgcccaactaattttttgtttttgtttttttgtagagactgggtcttgccatgtggcccaggctggtcttgaactcctgggctcaagtgatctgcccaccttggcctcccaaagtactaggatttcaggcatgagccactatgcctggcctgtaatctttcttaccttctcttgccagagggacagcaggtcccaggggtatcaccatggcccaggctgtacacccagtctatgttggcgacactcactttgagagctccagtgtccatgctgctcaagggagagtctggatgccacataggtaaccagcggcygcagggagaggagcagtctcytacacacacagcctgcttccctgacgctgggtgtgtggagagggagcagggccgttgctgtatttaatgagttaattctctctttctttyttttttttttttttttttttgagacagagtttcactcttgtcacccaggctgtaatgcaacggcaccatctcggctcactgcaacctctgcctcccgggttcaaatgcttctcctgcctcagcctccttagtagctggggttacaggtgcctgccaccatgcctggctaatttttatatttttagtagagacagggtttcaccatattggctaggctggtctcaaactcctgacctcaggtgatccacccgccttggcctcccaaagtgctgsgattacaggagtgagccaccacgcctgaccttatgagttaaacctttagtttatgtcttagtctacttgtgctactatgacacagtacctgagactgggtaacttacaaagctcagaaatttattttcccacagctctagaggctgggaagtcccagatcaaggcgccggcactccatgtctataagggttgcactttctgctcccaagaaggtgctttgctgttgcattctccagaggggacagataccgtgttcacacacagcagaacgcaggaggtcaaataagggccctgccaattcccttgagcccttctataaggcactatttcattcatgatagtagagccttcatgacttaatcccttccctcaaaggccccacctctcagtactgttgcacagagcattcagtttaaacatgaactcggaggggacacaaacaaaagatagccgtatatgatagatgcattttggctcattcaagatcatcccaccatgaatatgtcagcaaacaaggggaagtaaaacattartattacaaaataacaaaaactaacattactgaatgcttcctaggcacaggcactgtcctgagaagttcatacatattaacccacttatttcagacctagggtatctatttttttttttttttagacggagtcttgctctgccgcccaggctggagtgcagtggtgcaatttctgctcactgcaaactctgcctcctgagttcaagcgattctcctgtctcagcctcctgagtagctgggattacaggcacccgccaccacacctggctaatttttatatttttagtagagatggggtttcaccatgttggtcagactggtctcaaactcctgacctcaggtgatccactcgcctcggcctcccaaagtgctgggattacaggcgtgaaccactgcgcccagccaagtgtctatttttattatcctcaatttgcacttgaggaaactgaggacctgagattataggtgatctgctcctgggcacacagccactaagagatagagccaagattcccaaccacactgctgctctctggggtttttgcccattgcaccttctgccctctggccagtctctgttgtgctttggtttcctagtgcatcacagcctcgtggagtttcacttgaaggaactgagaaacaaggacaccaacatcgaggttaccttccttagcagtaacatcacctcttcatctaagatcaccatgtacgtaagtgtcccacctggttgactcctccccttaggagttggttactttttcattttacacacatggacatcccaggtcagggactgtgtgattgctgatgcatgggcccagccggcttggctgggggcagcacctactatagatccagccacagacacatgctgaggagctgttcagtagtgggtccaagtatagcagattcagatgagagtaggcagggcaagcaggcagcagggatggcatgtcccaacagatggagaggacataggaatcaggtccctgagaggaaacagtactctggaatccagacagtgcgggtatcagggatgtcagtagggaggagggcctcagtcaccagcccaggaagggctagccagagcctggagagcacccactcctgggaaaggagagcagttctgggtcagttaccagaatggaatctgaggcacagggtcagtcagcaacggagtgcgagctgagggccagactagcggccaggagggcttggtgctgggtgattcctgaaactgggggtagtcattcccttcctttgttggggcagacttgggcttgggggctggtgggactacgcttgaagtgagagggcaargaaccccaactgtagggagccacagcctgcaggggataggaagtcagcagccatggtgcatgcttctttaaaaagcaaccggttagttattcacaagccagcgggagacagattgtcagataatgtcactgtctcagtgagagtccggtcaggaaaacagaggaggtccaagagaaggaatttagcacagtgaactcattacaagtgtgttggatgagctggaaaacagagatggggacacaatgcagagattaatcacaacaggagccaatacaaccctaggctagagggacaaagcaggagtggagttggcaaagctgggtccacagggaaggctgcttggcaggagctgaacccatgggaagtgcggcccctctggaacccctgcccaaagcagccacccacctgagcatgcttccactgggttagacctcactggaacctgttggtgggggaacctgcaggggaatagatcagtccagagcaaacagggaaatgaccagtgcacacacacttaaatgagtgagcaatgccctgagagtgacagcatagaagacagagtctgactgagtccaaggaaatgatgagcaggctttccaggagctacccaggccaggcttagagagaatgtgacacctctggygtgtctggagcacagatttggggttgtggggatgctgtgaggctggagaggcaagtcagagccagaccctgccaggccttgaaggacaggtttttatcctgagagtagtttggagagccactgggagttttaaacaggacagtgatgagatcagatgtgagtttggagatatttctcgggttgggatgttggacatgaactctgctgtgaggcactacaagtttctgctggaaggagtgcatttcactcccaaaaccgtggccactagctggtgttccttctggctcacccaargtcacacagctaggtacagccatcaggattccagcacaggcctgcaggtgcccacagagccttgcagattgtggctggatatcagtaagccaagtacctttcattagacccgctcaaggttgtgctacttctagaagggtgttttcatcatcttctagcccattggtaggtccagcaacactggcaggagtcatgaaaatgacccacaaccctgactgcacgttagaatcacctggagagctttaaaaaatactgacgccaagccccccaacccagaccaatcacatcagggtctctgggcataggctccacagctacaytttaaaagctccccgagtaattccagtcaacatccacagattagcgcttcctcctccatgaagaggttcacataactcttttgaagaaggcaccagaacatgattcacttcttgcagatcagaaattgggggaaaaacggggaggttatgtgtggtctttttccaaatttctatagctttatgcracgctaagatttccttctaattggagaattaacctgggccaactccccaaaccactcacttaaaagatttttcatattccttgtattttacaaactcttcagtctaagcttaaaggaaacaatcttatttattccctctgtaatatttcaaaagacttgtgaatttaaaaaaagagggaatggtttttaaacaaaattatacatgatcttccctcagaaggaaaaaacaagtgatatgactaacactggactaaaaagaacacaaagaggccctatcaccactctgcgaaggccagaaaggaacaggaaacccagttggcaagggtggttccccacaccacccctgcccccgccgagaggaacgcagcgccctccttctttcctctttttcagagtcccacttggattccagggaggatcacaaagggccccacaagtcaaattccttccctagctgggtggtgcagctctgctgggcgccctccttgatcccccactcaccaccctcaggatctgctggctgggctgtgccttgcactcagcgtgaagactttcctcattgaatctcacgattttttgcttttgtctccagtacctagtacctagggggtaccacagcccttttggaagcaccctgctaggttgatcacttcatactcctccctcatctttgtctcagtccaaagtggtgcctgaatctttaaacataaagggaatctgggggggcaaagccaagaggctgggttaagacagaactggatgccattttcactctgagtctcctcagctgaagtcagtatgaaccaaaccctacggttcaagttcatagcagcatgtagggaagctggaacttacacctagttgctatgtgactccacagccaccttgccagsttaggtaacttgtccaaagccatacagctgggaagacaaacctgggttccacccaactctgtctgcgcttcatgatgttttcttgttgctgtttccacccacacattcatacttagcctaaaacagaaaagtccttacacagaattctttgaaaaggaatgtcctaaaagagggtttctacttctgggtaattagatctgaaggtgaagatctcctccagctaggaatccaagaacgaggaacagtttttccagatatgaaaatccaggagctactattttgttgcagtgtccacttgtttattctaaaaaatcaacaactactttcttggtcataytcaaagctgtaggtgtgggcagaggggctggtgarggtgacacaaaggactgtggtaaggagctaaccccttggtgcatgacagccaaccagtgccaccagcagagcccgatcggagccaaaggggaagtacaggtggtaagggctacagtcatttactttccctttacccttttcttgcagacctaagcagcaacgctatgggaaaggaatcatagcccatgccaccccacaatgccagataaaccaagtgaaattcaagtttcagtcttccaaccgagtttggaaaaaagaccggactaccattattgggaagttctgcactgcccttttgcctgtcaatgacaggtaagccccagtattcacctctgcaccagatgcactcacacatcaaagaccagtcttggcattagatgtgctgcctattgaggttcaatctcatcatagtgattatcatcttagaagcagagatgacagacacccggtgttttccagaacctcctgtgggaccatcttgggttggggaaattccactgtatttgttctgcatatttggtttctatgtaagattttattagaacaaagttttctcattgcatattttctcctctgtggcctccactccaactgtgtcatgggtcacattcatgggtgtggatccagaatccacatcccctttcccttcctctaaaggcatttatgtcattaaccttaccacccctgggcacttggaccacaggaactggctcttaattgtaggtgattscagatttctttcaccagacatcatgggaattcaaaagccacacaatgccaagccctgtctcctcaccagccactgctctcttattgctcttctcttccagagaaaagatggtctgcttacctgaaccagtgaacttacaagcaagtgtgactgtttcctgtgacctgaagatagcctgtgtgtagtttaacctgggcaggacacatctccctgcatttttttttttttttttgagagagaggtgtgatgagggatgtgtgtgtgcagcttattgtagaccattactactaaggagaaaagcaaagctctttcttattttcctcataatcagctaccctggaggggagggagaactcattttacagaacttggtttcctttgccgatctyatgtacatacccattttagctttyccatgcatacttaactgcacttgctttatctccttgggcattcktacttaggattcaatagaaacatgtacagggtaaacaattttttaaaaataaaacttcatggagtatctgaatcatttaattgttttacttgaatggaattctgttacctacaaaaagttgagatttatactctgtgggattggagaaaacagtattgcattatcggtattaaaatagcaactaaaagaagtacttggaaaaagagaggggatgaagggtagggaggaagatggcaccatttaccaacccttaccattacctcctctggatatctggaaggtttgagggatcagagagatcttggggaatacaggtagatttcctctgggttagtgtttcccaaactttgatctttgtaaataaccttgtatcagccgcagcccagcaaaaaacagatggtgcgctcaatctgggttatttgaggagaatttaagaaaaggacaatttgccatagtcttttgtggggcaaccacagggataatgcagttccctgaagctactggcagtagaagctgctactaccctacctgtgaagaggccagagaaggaggggaagcaccagaaggctgcagacctgcagtgcagggacacagccagccagcagcaaccccgcagggagggagcagaagcacaggttctctgacttcactcttcttcctctcccattttcctgctagtgctccccattaaggacccccaacagaagccagaggacaaataacacattgacatggcctaaccaggcccggggcatacagcaggacagagaaggttggagagtggatgggaagggggtgcggaactaacagatatggcacacgccttcaccactttcccaaatccaggttgcctcggattcttttattctttaaattcactttttaaaaaacataaataaatgagctttaaaaggaaactgctgacttgctgattcactctccacaatgaagacagggagaatgatgtaagcaacaggctgcaattacttcatctgggccaagtcagccagggcactgagagagcttcggcctttgtccaggccttggaaatgcaaccaaaaggacaggtgaggctcacgaagatgtttaactgtctgcatgatcacagtcatgtctaaagaatacacatgttccctgctatgtaggcttgcaattttctattttgcctcaaaccaaaaaccctcctttccttttccttctctttactccacccaggttcctccctagagacagtcttaccctgagctgtattacgctgcacttccatttgccatcttgggagacactgcttagcacatacttcttccttagttttccccactgctcgttgcttttttttccaaatgtgtatcacatttctgtgatgaaaatcatattgtcggccgggcgcggtggttcacacttgtaatcccagcactttgggaggccaagctgggtggatcacttgargtcaggagttcaagaccagcctggccaacatgatgaaactccatctctactaaacatgcaaaaaaaaaaaaaaaattagctggaaattagtcagtgtggcggcacatgcctgtaatcccagctactcaggaggctgaggcacaagaattgcttgaacccaggaggcagaggttgcagtgagctgagatcatgccactgtactccagcctaagagacacagtgagaccccatctcaaaaacaacaacaacaagaaatcatgttttgtgatgttgatgctaactggtgttaaactcactcaatctgtttttcagtggcctcaaattccattctgcttttggccatagccctgggtttctttgcgaatattttcttatttttaaacactgttagactttctcacatgttactttgctccgtcagaaattttggattattaccttacatggaaaaaccagtttctctactcataaattaatcctagaaacaaatacaatgagaacattataatgtttaacattccaactagatactgtggtctgatgcaggcttaagtcctgggcctgttttttccttttttttttttttttcctttcatgttcaggaggcaaaattttttctttactacaaaggggaaatttgcaagtatgtgagagatgttaaaaatttatcagcactggccaggcacggtgttgtccagcactttgggaggccaaggcaggcagatcacctgtggtctggagttcaagacaagcctggccaacatggtgaaaccctgtctctactaaaaatacaaaacattagccgagcgtggtggcaggcgcctgtaatcccagctactcgggaggttgaggcaggagaatcgcttgaacccggaggggtggaggttgcagtgagccgagatcgagccactgcactccagcctgggaaacaagagcaaaactctgtctcaaaaaaaaaaaattattaacactgaatggaaacatttttctatatgtaatcactggatggaaaggatataaaaaaatgcataactgtctatgagatggaatgttgtttaatgctgggtctatgtggtacctaaaatcatcctgtccaggggcacgtggcccacactttgggaaacatggctttaagtagatgggatgtctgtggggtcagggaaagggagagctaacacggaactctgctccatggcagaacaaaagcagaacttgggtctcccttccacacccactttgctcactctgctgcagtcttttcatgaacagagactattacagaactaattaaattcaacaggcagattcaccaccaagtgcaagatacactgccgtaagatacagaacaatgtgaccttggaataggcacgcaacaaaaacatccaacattgcacagctttttactatgttccaggcaccattctgagtgtttcatatgtattaacatattttatcctctcagcaagcctatgagatacatgctattattatcccactttatagataaagaaatcaagaggctgaggaaccttcaagatcacaggtctagtaagtaaaggagccaggattcaaatgccagctgtccgccccagagccaggtgattaatcaccactctaaccagactcagaaacatgacacagaagtagcccctaaaggtccacaatgcaaccctgtgggactggatacataatttacagggttcagtgcaaaataaaaatgcaggctccttatttaaaaagttgagaatttcaagatggtgacagcagagcatgaaaccaagtgtggggcctgagtggagccctgtgcccaggtgtacaggtcgcatgcccaggaaactggccttgcagccaggtgagccagctgtcaattcccagagccgggcattccagccgagcttgtgtagtgcagctgactgtgaacccagacaaacctcagttggctaaggaagaaagttgtgaaggatgaaaaaaaggtcatagggcctttgagagggatgctagtgtttcttacagaaaatattcagacccagccaggtgcggtggctcacgcctgtaatcccagtactttgggagactgaggcgggtggatcacctgaggtctggagtttgagaccagcctggccaacatggtgaaaccttgtctactaaaaatacaaaaattagccaggcatggtggcgggcacctgtaatcctagctacttgggaggctgaggcaggagaattgcttgaacctgggaggtggaggttgcagtgagacaagactgtgccattgcactccagcctgggcaacaagagcaaaactccgtctcgaaggaaaaaaaaaaaaagaaaagaaaagaaaaaaaaaagaaatgaaaatattcagaccccaggggacatgcctgtattaaccatcactagattttcagatgaatgttgttgaaggttcctctacactagaggctatgggagcttggttcccactgcacagcttggtgacaggtaggagagagcccaactccagcagcattttggaatgctgtccccaacatctggagcacaagatgtcagagagagactgggatgggttgataagggagaagatgacttcctagcctctttcgaggtctgatgatccacactttgagaatagacgtaggaaagaccttctactcctgtgtcctacaggtgtgagattctctagcaactgcagagtggttaacagcaaagaggacatgcgtacccacttctgaatagcagggctggctgcttcaatagagcgagaaaaaggtgggagtagaaggacaggggagaggagaggagatggaagcatggatggaggtgactgcagtcagataaacagttgtttggcacacaaacccagcgttccataaagtcctatgtggactctgtgagttcacaatagtttcccttgccagcagctcacaaaactgtgccttgattacaaatctcatgacaaatcaagcccttgaccaacagggactttgtcttgtctgctgttgtactccaagtccctagcacacagtaggttctcgaatatttgttagaaaatgaataaataaatggtcccaggaagtattttcacttctaaggcttaattattggcagaattaaccactgaagccatctcagtgttggcttttctttgcgagtagtttttcactaatttaatctcttcacttgttatagatatattcagattttctttttctcttgaatctatttcagtaatttgtacctttctaagagctgtccattttatttatctaatttgttggtacacaattgtttgcagtattctcttataattctttttatttctataaggtcagtaatgatgcctcctctcttattcctgattttagtaatttaagtcttctctctttttttcttggtaagtctagataaagatttggcaatttcattgatctttttgaggaaccaactttggttttccagtctctagtgtgataattgctactctaatctttattgtctttctcgatcagatattattctacatcatttttaaaaacagctaaagccacaaatctgccttgacccttttgtttttgcttctgctctgtcgatcttccttgaggcagcagatctttcatgacctattgcccaaaaaggatagagtcacagggtcacagacaattcttggaaaaatttacattggtgaatatatcaaaatgatattctgctacatatgcataacttatcttcactcttggaccacaaagatctatttcagagacaaatttggagtggaattttccttaacattatcctcaatagagcctaaggtatagaatacactcattttctcactcatatcctgagacctcagtggtcgtttaccagacgttggaattcctaaatgaataccattgccttaaaaatcatattcctcaggtcagaaggctagagtgctctagtacaggagtcctcaacccytgggtgagtgaacattaaacctgagctccatctcctgtcaggtcagctgtggcactggattccaggagtgtgaaccctattgtgaaccgtgcatgcaagggatccagactgtgctctccttatgagaacctaactaacgcctgatgatgtgaggtggaacagtttcatcctgaaaatcatccccctcaccactgtcccagcactgtactggtctgtggaaaaattgtcttccacaaaaccagtccctggtgccaaaaatgttggggaccactgctgtagtagattcctagtcagtttgaggtgtctttttttttttcaggtggacagaaagtaggatttattgttgggccttaggaggggcagcacagtggaagccctcatgagtgcagggcccaccacttgtccagagggccacgactggggatgtacttgaccccgcagtcatctggaatgagccgtttctcagccaccatgtcttcacattgaacttggtaatgccccacttctttgagatgtggatcttctggtggccagggaacttggccttggccctgtgcagggcctcaatcacatgctccttgttctgcagcttggtgccgatggacacgatgacgtgaccaatgtgaaccctggccacagtgccctggggcttttcaaaggcacctcatata

SEQ ID NO: 95070 - DNA, 19307 bp, Homo sapiens
tcagcctctcccttcgcctactccttccccacctgaggatattgaagattcaatatctaactccagtgactttggcttaacgtcaccccctgatgatcttatttcttttcacgaacagccagtacttgtagctcccacggccccgacttggacagcccaggactgtatctatgctaactcttccctcttcaaacctttgcagcctttgcctccggagccatctaatggctccggaactaaactacaatttacctgtaattctgcaggccctcccccatccaccacagcccctcaccctcctgtcatttcggttcctcaactggtcactttgccatccactcaacctgcttctctgtacccttcttcacatgtggacacccctgccactctggttgcacaggattgggcaataatcaccagtatgcttctgcctcttctgctcctctggtgcccctttctcacgctctcatactggtccaacctcctcagcctcagtttcccttatctacacataattttcctgtcacttctgtgccaactctgtctcatgtgcctgttgttgaaatttccatgcaatgcttattacgccaaaacaaacaagtggattagaggcgtgggcttatccgttcatgctggaaccttgcaatgctcaaggggtacaagtgcatcgataggcgctgctcaatcttacctttttaaaagaattcaaggatgcttgtactcagtatggtcctacttctccatatgttaaaatggtattacagactctttgtactgaggtcattttgcttcctttagactgggacttttggcaaaagctgttctaactccatctcaacatttacaattctgtacctggtggtcacgggaggcccatctgcaggctcagctaaatcgggctgatggcattctaattactcaggctcagctcacaggctccaataattactctgacactactgcccaattaggctttgatgctctcaccgtggaacaagtaacaaaggtgtgtatgagagcttgggataaattacgcgccccaggccaagctcctgtttcttttactactgttaagcagggtcacaatgaattatatcctgattttttagctaaattacaagatgctgttgaaaaatctgtctctgatgagcacgctcaaggtattcttcttcgaatgttagcttttgagaatgcgaaccatgagtgtaaaatggccatgcattccgtccaacaacaaaatttacctgatcgtgaggtgttgcctgagtatattaaatatgaaggcattggatcagacacaaagctattctgtgcccacaaagctattctgtgggcacgggccatgaaggacggcaatcaaactggctcgactgattcttttcttggagcctgctataattgtggtcaacttggtcatactcgaaaaaattgcacagttaaaaacttaaaggcagccaagccggctcaaaaaacacagccaaatgctcctgctactgtttgcccttgttgttgtaaaggtaaacattgggcaagtacttgccactctaagtctgatatagatggaaatcccttgccacagaaccagggaaatgggaaatggggccagtcctaggccccaatttcaaatgggacacctcagactcagacgaatgttgcctttctgcttcaatcggtcccaacgcagcccccagcacaaacaaatttacctacagccaacccagatgwgtcccagcctcttcttctgtctcagtacaacgcttatctatgctccagagtaaggggaggggcggtcaatctctgtagtaccattcctctaaatttactacctaattctttgcctttaattcccagaccaatacctggaaacctggaacgattataacatggggaagagggtatgcttgtgtttcaccaggagatcatcaatcccctgtctgggtgcccactagaagacttaaacttcatgtgaatactgacaataaaaaccacagggaagagacgtccacgtcagagaccaccctcatacctggtgagatctgtgccaactcctcagaaactggcacgccaaatcaaaatgggtctggttcaatcctccctaatggcaacagaaacccctctaactaatcccacttctcctaattccctttctttttctccttacgaacctaaaaatctcaccatttctattagcctgaaaataacatccccttattcttctattcctccttcagcactggatcttgcttacaataggttttatttaataattctcttccttatactttctgtctcaccagtttcccctcacattgatttacctgctacacaaaattattcttgctgggcttatgtgccttttcctccacttattcaacctctcacctggatggatgctcctgcggaaatctatactaatgatagtgtgtggatgcctggagctacagatgaccgttgccccactcaaccaggaaaagaaggcactgcatttaatgttcctacggttataaataccctcctctgtgcctcggacatgcacctggttgtatccatctagaaactcaagtctgggctgcgtaccttctggagagatcagccacaggggaacggggacatttggtctccagcctctccctttctcctttaagacaaatgaaagggggagtaataggagataccccctactttcaatataaacctgtaggaaaaccatgtcctaaaatttttgagggcccatctaaatctttaatttgggaagattgtgttaattcacatgcagtactattaaaaaatgactcatatggtttagtaagagactgggcaccaaagggctatttgaaaagcagttgctcttctgctggaagggaatgcctggaggctacttgttttatttcttattgggaggacgaggatcatcatcctactttgcataggaggttcagctcattctgtcccttaaaatgggaagataagagcattaccccctgccacccgaggcctcttatgatatcccccattctgagcccagaacacccagaactttggaaattggctattgccatgtccagactgcgagtatgggaaggggaaacttttctttctgttgtccccactaccacccctcacatccgtgattctgaaacccatgataaatcccctttggaccattttcctctttttgatgccagtcctcctttatgggactctgattggcattatgataattcttctggacccaggtatgtccccctacctcttcagaatccccgggcacctcggattgcttctttacggcatcaaacattgggcgttgccaccgccactcctccccctcggtatcaacgtagattcaaacattctgctttgtttacctccagcctgactattatacagagttgtgttaagcctccttacatgctgttagtgggaaatatcaaaatttggatgaacaatcaaaccgtccaatgcattaattgtcatttatccacttgtgttaactcccgttttgactcaggaaaagtgtaatgttggttcgagcttgagaaggaatctggataccagtaactttacccagaacttgggaatcttccccctcagtacatttaattaatgaagtgttacaacgaattctcaaaagatcaagagatttgttttcactttaatcactgtgatcatgggcctaattacagtcactgcactggccaccactgccggagtggcattacaccaatctattcaaatggctaattttgttaatgattggtaaggcaattccacccaaatgtggaatcctcaacaaggcattgatcaaaaattagctaatgatttaagacagtctgttatttggcttggggaccagctaatgagtctcgaacatcacatgcaaatgcagttcgattgcaacacttctgatttctatagcacaccatattcctacaacgagactgatcatgggaaatggtcaaaggayaccttctgggtagggaagataatttatccttggacataactaaattaaagaaacaaatttttgaagcctctcaagctcatttatccattgtgcctggagctgaggcgttagatcaggtggcagaaagtctttctggactaaactccacaacttggattaagtctactgggggctccactgtaggaaattttggaatcatgtttctctgtttaatcggcttgtttttagtgtgccagaccagtcaaagaatcctgcatcaaaaccgagagaacgagcaagccttcatcgccacggcacatttatataaaaagaaagggagagatgttgcgggaagtcagggaccctgaatggagggactggctggagccatggcagaggaacataaattgtgaagatttcattttaatatggacatttatcagttcccaaataatacttttataatttcttatgcctgtctttactttaatctcttaatcctgttatctttgtaagctgaggatgtttgtcacttcaggaccactgtgataattgtgttaactgtacaaattgattgtaagacatgtgtttgaacaatatgaaattagtgcaccttgaaaaagaacagaataagagcaatttttagggaacaagggaaaacaaccataaggtctgactgcctgcagggtcgggcagaaagagccatattttccttcttgagagaggctataaatggacatgcaagtagggaagatatcactaaattcttttcctagcaaggagtattattattaataccctgggaaaggaatgcattcctggggggaggtctataaacagccgctctgggaatgtctatcttgtgcagttgagataaggactgagatacgccctggtctcctgcagtaccctcaggcttactagggtggggaaaaactccgccctggtaaatttgtggtcagaccggttctctgctgtcgaaccctgtttgctgttgtttaaggtgtttatcaagacagtatgtgcaccgctgaacatagaccctcatctgtagttctgcttttgccctttgccttgtgatctttgttggacccttatcagtggttctgcttttgccctttgccttgtgatctttgttggacccttatcggtagttctgcttttgccctttgtcctttccctcagaagcatgtgatctttgttagacacttattagtagttctgcttttcgccctttgaagcatgtgatctttgtacctactccctgttcttacaccccctcccctttttgaaacccttaataaaaacttgctggtttgaggctcaggtgggtatcacagtcctaccgatatgtgatgccacccccggcggcccagctgtaaaattcctctctttatactgtctctctttatttctcagccggctgacacttatagaaagaacctacgttgaaatattgggggtgggttcccccagtacgctagtcctgctgatgagcaaagaaggtgttgatggcattttgatcaacaagaaatgttatgaaacggcctcccacctctggcattcctagtactgacctatctctcccttcccttccaccgctccccacagcttagcacccctttcgttcccatacacatgtacatttttattttggggaccattaacccacagcccttatcgctgccaaaaccacatgggctggagggccagggctgcatggacagtcacaccactgcacaccagcctggtgatggagcaagactctgaaaaaaaaaaaaagaagcataaaagacctttaacagtccctgctacttgtgaccctcctgaatctgtcatctgtccagtgattttgattttgcaacatggaaagttccaagccttgactcctgagcccagataccattcgcactctggagtcattcaagcatggggagctcctcagagggtgatcaactgacctcccttacctagctcctcctccggaggtttgccctggagttgagccagcccttgaggaggccttcactcccaccgcctctctcccttctggatatgagctcaggcctggctgggctccaggagaatctttccacaaggcaagagataacacaaagtcaaggtgaagatcagggtagccctttaaaaggcctccttgtgccctagagttgccacagctcttctactccacygctgtctatcttgcctgccggcacccagccaccatgtgggagctcgtggctctcttgctgcttaccctagcttatttgttttgrcccaagagaaggtgscctggtgccaagtaccccaagagcctcctgtccctgcccctggtgggcagcctgccattcctccccagacayggccatatgcataacaacttcttcaagctgcagaaaaaatatggccccatctmttckgttcgtatgggcaccaagactacagtgattgtcggccaccaccagctggccaaggaggtgcttattaagaagggcaaggactkctctgggyggcctcaaatggtaagtggtgcccatctcctccctgcccccttcaccaccccctgggattgttcaggtcttcagaccatgcctagaatggggcttccagctccaacaacctgtawttcttcccaaagtagactagtgggatgatgtgaagggagtgaaccttcagacccccacccagcctctaaattaggcaggwwgaattaaaggaatgtctcctctaccaggctgcccaggaggtgggatgggaggaccacagtggtctgaggggtcaaggaatcctcactccactcctctctctgagcctagacttctctaatggactgagaaggtgcatgtacagcacttagcctagcacccagcacagtaagtgccccttatacagccaggattcatgttacttttcatggaaaatgggggcagtgactactgtcctccatraaagctgctggggagaattagcctagctattgcaggctgggattgctgctttcctggtgctatttccagctactcaggctcacaggggcagttttctacaatgacatttcagggttgctgatgagcctcccactcagcagggcccccagcctctcagcattttttttttttttttttttttttgagacagagtctctctctgtcgcccagcctggagtgcagtggccaatctcagctcactgcaacctctgcctcccgggttcaagtgattctcctgcctcagcctcctgagtacctgggactacaggagcatgccaccatgcccgctaattttttgtatttttagtagagatggtgtttcaccatgttagccaggatggtctcgatctcctgacctcgtgatcctcccaccttagcctcccaaagtgctaggattataggcgtaagccactgtgccctgccagcctctcagctttgatcaagccaagggttggtttattttttcttggaccaatcagccaggtctgctgaccaactacctagctcscacctctgctggcttcctccygggggcagagaagatggagaaggctagtcatgtggatcttcagggtcaggaaatggaaaagggaggctttggacccttttgctttggggggcacctctagraggaggcrgctcggcccaagtccagactgggtagacaaaacatctgcactctccaaatgtgggcttgtggctgggtatgcaggcttgcaatggaagggtaaacctgagtgaggtgagctgtgcctttagctcagctaagggctcagggaaaagcagagatctgtgcagtcctcagcctctacaagctcacctgctccctaccctctggacaggcatagtttagagagtttatcccatccagagttgccttcctgtggtcagaaactgatgagcaaaaagaagcccagagggcaccctgtcagcgaamagaaccccaatgctgctgcattctaattaagggttctttctttctccttgatctactgtatttctgaaggaattgggagtaggaggccttagggtctgtcctaccaagtccttgcagtcatggtggagtgcagtggggctgtgcccacatgggagtcagcatgccaggtacytsccttctcctccaggaaggaaagcagggaccagaggtgtaagggcaagagtggggtggatggtgtgagattcctacagccttgcctgctctctaaaggcaactctagacatcgcgyccaacaaccgtaagggtatcgccttcgctgactctggcgcacactggcagctgcatcgaaggctggcgatggccacctttgccctgttcaaggatggcgatcagaagctggagaagatcagtgagtgccaggctggcccctggggctggggctggatcccacaggagctgctggagggagaggagggttgggcaggggtaagggttaggactagagcgcaatgcmgccttttcttggctactgctgccatctagtggccatctgctatctgtccccygctcctgttaagaggcaactggtacagagagggggtaagggtgctgattcatttcccaccctcatgccccctctcccttcagtttgtcaggaaatcagtacattgtgtgatatgctggccacccacaacggacagtccatagacatctcctttcctgtcttcgtggcggtaaccratgtcatctccttgatctgcttcaatacctcctacaagaatggggaccctkagttgaatgtcatacagaattacaatgaaggcatcatagacaacctgagcaaagacagcctggtggacctagtcccctggttgaaggtgagatgctgccagccctgccttcaggttctagyagaccctgacattgtccccaatcttccttcctttttacttccctgctccagccgcaatgacccatctttttcctgattacctccgccacctctacctcctctgccacttaaaacctttgccatttctctgcagagatagatttagccttttaattatgcaccttagtactccagataatgaccttcatttcttttccaattaccatgtgccagtactaagcattctatacgcattcatcgctgaattccccttggaagtaggttttattatccccattgtgcaggtgagaagcaggcttagcggggttaaggagcttgtctgagccttcaggctcatgtctctctcactcctaagggctggacacatagcagagtcagcgcttgatgtttgattgaatggggaaggagaggtggagaccacgccctcctcccttgtttagaattgtcttcgtcgtcatgataaacccgttctgtgtccccatcttgccttccattctggctgaaggtcaggggtggagtaggaacttccagagacagaaagctaagatccgcctccaggagagactctggcagctggagaagcaaaatggaagaagggtggatttaacatttctttttatttcccagattttccccaacaaaaccctggaaaaattaaagagccatgttaaaatacgaaatgatctgctgaataaaatacttgaaaattacaaggtaggtgatagagcagaagagaatatgagttaggctaaaagkaatcacaagagcagggtggagtccattctacacactgtagaagcttcaaaaccaagcagagaacctggcacatagtaggtgtacaataaaaactgacttaagggctgggcgcggtggctcacgcctgtaatcccaacaytttgggaggccraggtgggcagatcacctgaggttgggagttcgagaccagcctgaccaacatggagaaactctgtctctactaaaaatacaaaattagccgggcacggtggcgcatgcctataatcccagctatttgggaggctgaggcaggagactcacttgaacccgagaagcagaggttgcagtgagctgagatcatgccattgcactccagcctgggcattgcaccaagattctgtctcaaaaaaaaaaaaaaaactgactcaaggagttgggatcgaaaagtgaggaactgaagaggatcctagaagagacctaacctctccaccaawtttaaagagggcccggggctgcctcctacctccacamgttcgtaggtcctgcccagacttgctctacttccaagtggaaggagccttgttatctctagtcagggacagaagtatggcaggagtgtcacagatggggctccttccttattaatgtctcccaacctcacccaacccaggagaaattccggagtgactctatcaccaacatgctggacacactgatgcaagccaagatgaactcagataatggcaatgctggcccagatcaagaytcagagctgctttcagataaccacattctcaccaccataggggacatctttggggctggcgtggagaccaccacctctgtggttaaatggaccctggccttcctgctgcacaatcctcaggtgtgcttccccctcattgatcctagaccccagccagcccaatctctgggctccagagaaagggagagccaattstctcaggctttctgtgcaggaagactaggcctgccctgctccttacccaagcagtagttggctttgaccccagagtagagctgccccatcttctggaagccgggcctgggccccagagccactactgggaagggactggacaggctcttctcgatgtcacagttggattcttctctaagcccttgcttctcctgggcttacacacactagtcacctccaacctactctggtcttcaggtgaagaagaagctctacgaggagattgaccagaatgtgggtttcagccgcacamcaactatcagtgaccrtaaccgtctcctcctgctggaggccaccatccragaggtgcttcgcctcaggcccgtggcccctatgctcatcccccwcaaggccaacgttgactccaggtgtgcctgccctcccagkgacatctagccccatgatgcattcaacactgcttgccagcccacctggctccccctacccccggcccctgctggccaacctaaagtcagtcaaccatcaactactaaaaatcatcctgccggcygggcacggtggctcacacctgtcatcccaacactttgggaggtcgaggcgggtggatcatgaggtcaggggttcaagaccagcctgaccaatatggtgaaaccccgtctctactaaaaatacaaaaattagccatgcatcgtggcgcgtgcctgtagtcccagctactcaggaggctgaggcaggagaatcacttgaaccaaggcggcggaggttgcagtgagccaagattgcaccactgcactccagcctgggtgacagagcgggactctgtctcaaaataaataattaattaattaaatataaaaatcatcctgcccccagccccgtggctccatrtctctaccacctacagacacgcattgactcatccacagatctgcctgacttcccagaggagcttcctgctgccctcagagacatgtggtctgggatgaaaggctgggagctccatgttccaaccagctgcagcacgcacataacatgcgctgcagctccaaacrcacacccacatacactgccagacaccaaagtccacagacacaggtgttcagacagaagcgcctgttaggagggaagggatggagaagggctggatttaggtttgatctggcagaagctgaggaaaacatgagtgagtgggaatgagggagtaaagggcattttcctcacggcggaagaatgagggggcatgaggctgagcaaggaagggagtacgaagtcccagacccamttttcctcttccactctggagcagcatcggtgagtttgctgtggacaagggcacagaagttatcatcaatctgtgggcgctgcatcacaatgagaaggagtggcaccagcsggatcagttcatgcctggtgagtctgtcctgtcctgcgccctgggccacacagcgagcctggactctgctccaccaccccagtaccccttcacctctgcmaagcttgctgctagaaaactcttggctccwactatacsgacctgttgacrccctcatcctgccatagacttacccaaactcttcacagctgggtttcccacgctcttcttccaaccaactgcaaattcaccctccaagaagccctctackcctctgtctgccattaagtctgtcccttctcccctcggatggtgctattttcataggttaattccayctcttttccatccttcctgaatatttcatttcctctgtgtcgttaagggctacctgaaagcagggctgtatctctccccaggcgggttccccataataaggctacatcctcagatcagggttccctgggcagggccatgtctccccctcaaccagggcagaaccatgcctctcctccctcctgccctaacccctggctgatgccactccttgccwgcagagygttkcttgaatccagcggggacccagctcatctcaccrtcagtaagctatttgcccttcggagcaggacctcrctcctgtataggtgagatcctggcccgccaggagctcttcctcatcatggcctggctgctgyagaggttcgacctggaggtgccagatgatgggcagctgccctccctggaaggcatccccaaggtggtctttctgatcgactctttcaaagtgaagatcaaggtgyrccaggcctggagggaagcccaggctgagggtagcacctaaaggctgtaactcacagcccctgtccaccctatgtggccccacaacacagatttagagatacaaccccccacccttctccgccattcttccctactcccaacccactctgccttctttttcagcttgtggcaatgccagtgatgtgcataaacagtttttttttttccataaggtccctgagtagttcatttatgtattcatttgctcactcattctttcaacaccgattttattgagcacctactatgtgccattcactttctcaggacactcgagctccgtggtctctgaagcttacattctagtgagggctaacaagtgaataagttcagagactcgtaagtgctttgaagtcaatcacaatttgtgtgatgtgatgagaaaatggcagaggcagtgggtggctgctttgaacaaggggtcaggaaaagtgttgcatgctgagaagcaggtaaaaaggcctccaggtgggagaggtcagcatggccagtgaaggggagagtgggccctgatgaggtcagagtggacatagtggtccgttcccactgtagctgggattacaggaggccaggagggaggttgggttttattctaattatgacaggaagtcactggaggattttaagtatgtaagtggaacaatctgtttttttgtttttgtttttgtttgagaaggagtttcgctcttgttgccctggctggagtgcaatggcatgatcttggctcactgcaacccctgcctcctgagttcaagtgattctcctgcctcagcctccaaaatagctgggattgcaggcgtgtgccaccatgcccagctaattttgtatttttagtagagatgaggttttgccatgttggtcaggctggtctcgaactcctgacctcaggtgatccacccatctcggcctcccaaagtgctgggattatagacatgagccacagcgcctagcctgttttttgttttgttttgtttgggtttttttgttgttgttttttgttctgttttttgagtgacatggtctcactctgttgccaggctgattgcagtggcacaatcatggctcactgcagcctcaacctcccaggctcaagtgatcctcccacctcagcatcccaagtaactaggactacaggcacacatcaccaggcctgactaatgttttactttttgtagagatggggttttgctgtgttttctaggctggtctcaaactcctaagctcaagcgcttctcccacctcagcctcccaaagtgtttggattataggcatgagccgctgtgcccagctggtttgtatttctgaaagatcgccgtagttgctgtgtggagaatgttctgctaagggatgggagtgggagcaggagaacagttaggaaggaggctgttgtgctggtccaggaaagccagatgttgatgagttaaaccacggccacagcagtggaaacagtgagaagtggtaggattgagtttatcttttgttttctgtttgtttgtgtgtgtgtgtgtgtgtgtgtgtgtgtgtgtgtgtgtgtgtgttttgagacagactcttgctctttcacacaggctggactgcaatggcacaatctcagctcactacaacctccacctcccttgagcgattctgctgcctcagtctcccaagtagctggaattacaggcgcctggataatttttttatttttaccagagatggggtttcgccatgttggccaggctggtctcgaactcctgacctcaagtgatcccacctcagcctcccaaagtgccaggactacaggtgtgagccaccgagcctggcctgagtttatattttgaaagtagggcaggccgggcgtggtggctcgtgcctgtaattccagcactttgggagtccgagatgggtggatcgcctgaggtgtggagttctagactagcctgcccaacatggcaaaaccccgtctctactaaaaatacaaaaaattacccgggcgtggtggcaggcacctgtagtcccagctactcgggaggctgagacaggagaatggcgtgaaccccggaggcggagcttgcagtgagcggagatcgcgccactgcactccagcctgggcaacagttcaagactctgtctcaaaaaaaagaaaaaaggaaaagaaaaagaaagtagggcaaaagtgttgtttgttttgatccaaataggcttcactgcatgttacctcacaggttcgaccttgggggagtgtatgtgacccacagactggacctgccgttgccatccctctgtcttggtctgcaaagaccaagactggtgtgtccccctttcctcacccttccctggggtaaacactgccaggtaagggcttctacagctgtcttctgcagcagtgcctgggttccacctccttctccccactcaaaaaccccaggaagtctgtaaaagcttcctcactagggctgggtgcagtggctcacgcctgtaatcccagcactttgggaggccgaggcgggcagatcacgaggtcaggagatcgagactgtcctggctaacacgatgaaaccccgtctctactaaaaatacaaaaaattagccgggcatggtggcgggcacctatagtcctagctactcgggaggctgaggcaggagaatggcatgaacccgggagggggagcttgcagtgagctgagatcgcgccactgcactccagcctgggcaacagtgcgagactccgtctcaaaaaaaaaaaaaaaaaaacaaagcttcctcactagaaaatgaagccctgactcctttatatctggaaactggtatatttaaaccttggtcattggccagtctgcaaatgaatgtcctgagacatcccggaagaaactgacccttttagcctagagagaggccccatccccagctccctggtgccagccagaccagggtcaggtcatcaacaacccagtccttcccctctgactagacagaaggacgtcagcagagcatggctgataccctgcctagctaagtcttagagagaagacgtccctatagggagcaagacaaggttttcagttacgacactaccttcttccttataaagagctttgttaatcaggtggcagtggacagttccctactattccctaactcggtcttggccttcatctgccatttaccctgggactttgctaaagagcctgcaggaggccaagtgtggtggcttatgcctggaattccagcactttggggggcctaggcaggaggatcccttgagcccaggagttcgagagcagcctgggcaacagagtgaggccctgtttctacaacacttaaaaaaaaattggccgggcgcggtggctcatgcctgtaatctcagcactttgggaggccgaggcaggcagatcacaagatcaggagatcgagaccatcctggctaacacgatgaaaccctgtctctactaatgatacaaaaaattagccgggcgtgctggcaggcgcctgtagtcccagctaatcgggaggctgaggcaggagaatggcgtgaacctgggaggcggagcttgcagtgagcagagatcgcgccactgtactccagcgtgggcgacagagcaagactctgtctcaaaaaaaaaaaaaaaaattacccaggcatggtggcatacctgtagtctcagctactcaggaggctgaggtgggaggattgctggaccccaggaggccgaggctgcagtgatctgagatcgtgccactgcactgcatcctagagcaagacccaatctctaaagaaaaagaaagaaagaagaagaaggattagtatttcactttcctgccattcaatgttctggttcaatagttggagaatgaaagagtgcatatgtgtgttggggggcagagtgagagagagaaagagatgaagatatatgggaacctatagacagacaaacagatatagatagatgtaatatgcaccaggtcagtatctgtcaaagtgtggctcacagaccccttgagccagactcatctgagaaacttacttaagaacacagactctggtccctatctttcatgcattgagtacactctgggagcagggcctggaaatctgcattttacaggctatccaggtgaatcttgtacacactgctgcgcaccccccccgagtcctcaagtgacattgtgtgagattcttgcaaacttgcgatgttttccatcccagttaaacccacccaccacttccacagaggacacagatcttctgctaattgcttatctcttcatcactagtctacaaaatgcctttcaggccaagcacagtggctcacacctgtaatcccaacactatgggaggccaaggtgggcacaacgcttgagctcaggaatctgagaccagcctggccaacatggtgaaacctcgtctctagctgggcatgttggcgcacacctctagttccagctactcaggaggctgaggtgggagaatcgcttgaacccaggaggtggaagttgcagtgagccaagattgtgccactgcactccaactgggtgacagagtgagtgagagagacgccgtctcaaaaaaaaaaaaaaaaaaaaaaaaaaaaagcctttcaaattctgagcaaatctgaaatacttaactttcctccagccaatcttattcccctctgctttgagctgaggatagcttgactcgatccagcacccagctgatgggggcagaggaaccgggagagggaagggacaaactccagtatagcctttcccttgggctcactgtggtgtcagcatctctcccaggctgcttgtgatgggggctggggtcagctgcccacaagctctcctacggacttcattttttttttgagacagggtctcactctgtcacccaggctggagtgcagtggtgcaatcatggctcaccgcagtctggaacacctgggctcaagagagcttcctgcctcagcttcctgggtagctgggactacaggtgtgtgccaccactctggctaatttttaagttttttgaagagatggggatcttattatgttgcccaggctggtctcaaactcatggcccctagtgatccttctgccttggcctcccaaaattctaggattacagatgtgagccactgtgtcctgtctaaaccttcattttgaaggaaactgagggccattgtgtgggctgggtatagggtatgacttgccccagatcacacagctacgtagcagcagggctgggaccagaactcaagatttcaatggtgcatggtggggagccagccatgctttcccacctgtcccctgtggtcatgcagaagggctcttgggatatttggccgggagagtacctttcaggcaagctgagtgaccttttagaaaatgactttatgaactttgactcctgcccaaactgtgctctcccgtctggaaggccttttcaccactgatctaaacccacctgccttgaggctcagacacattttttatgactcctgagtccaccatgaccatccctcttcagcactcagcttctgttccttggtactgaacctaaactgaaccttggcatctgagcatctgcctggacttgaaatgggtggggccccccacagacactgtccacctcctgtacctctggagttcaagactgagccttctcatgttctttatcctgcatatcagcacctgacaaatagaagggtagacaaacaagagtgatgcaggacaggcaagccctaaaattggggcttagcccaggagggttcatggcttcacccagaaagaattccagcaagcagcagtggtggtagccagcaagccgcagtgcacagagcagcagaggtactgctccttgtggagcagggctacccagaggcagtgtgcccagaagagcaacgcaggggcagggctgcactcatatggacatctacttttaattatatgcaaattaaggggtggattatgcagagatttccaggatgagggtagtaacttccaggtcatcaggtcgttgccacgaaaagggatggtaactcctaggttttgccatggcaatggtaaactgacatggcacactggcaggcatgtcatggaaagctgcttctgcccccctacctgttttagctagtccttaatttggttccatgtccgagccccrcctcctacctcaagaggactgaatcaaatgctctaaatcacttggttaattggcccaatgatagtaaataaattctatctccttatgcagaaggaagcccagatctttgacaaaactggaaggtctttgccaagaccccacagttaaccgtctgagcctcagactgtccttaaccagtgatgtgatgataaataaatgtttaacaaccaggtctgggaggggcgggggtgtgcggaatagccttgatttgtaatgtttgctgattactgtggtgtagatactcccaacgtgaccaattttaaactaccaatgtgatgccagtaaacagggttggaaagagacacatagtagcattatatgttctttaccgttgttattattacatagtaaatgccattatgtagtatttccaccatactgataggtaaatgtaaataacctcaagggcacagataacagtaacatgtagtaaaataactaggaaat

SEQ ID NO: 95071 - DNA, 33830 bp, Homo sapiens
  misc_feature (1)...(33830): n = A,T,C or G
actggaaagtgttttgagggccttctgacagtacaccacagtgatttttttttctgtcgtaatccatttatgactaaaaaacatgatgctttttgtttttgagatagagtctcgctctgtcacccagggcagagtgcagtgkcacagtcttggctcactgcaacctctgcctcccaggttcaagcgattctcctgcctcagcctcctgagtagctgagattacaggcatgcgccaccacgcctggctaatttttgtatttttagtagagacaaggtttcaccatgttggttaggctggtctcgaactcctgaccttgtgatccacccgcctcagccttccaaagtgctgggattacaggcatgagccaccgcatctggccacatgatgctttttttttggttgctcacatgacaagctattatttttgtgtcactttaaacagaacttaaggtatagacttcatgcattccttcttgagccctcttccattacagcagttaaattttgtccagattctgtaaactagtattgctgcctgagtggccgtggtatttcctttgagctgaacttggccattttagcttcttattagacaaaacagtatacttggagtcctggtgaataaccagacaaatggaatttcttgtccacaaagctctagcacagtggttcagcgcagaggcccatgcttccctacttgatcttgtcgtcactggctcagccaaatgctatttctcaaagttcataaatctcacatcctctttgtggagtctttcccctttttgtacatgtataatccccggcctctaagtagtctattcacttctaaagctgttgacttggcaagataacaactgcatcattcacacaagcaaatctgctcttggaggacaaaaagaggtttattttggcttagatgactccgattggycatctccattgaaaccttggcagaagataggtcccttggctactggggagaaaagtcaagtaaacctttagtgccaggaatggtgtttgtaaagattcggcatgaagtggtacatttcgtccttgggcttcttactggcttcaacccaaacagaatcacttagtgctgttccccgggttaatgatgttattagaacaattgactcaaagcaagaactgaaaggctgagtgctttgttgtgaggtgtgcaaaattcaagtctatcaaaacaggcttagcagagctgccaccagcaggacagcgtttagcttttgtttgctgcttctttgattcttcatgggcagctggcatttctgttgctggtttctactctctcatccctagtggaccctacgttttctcccctgagtgtgcttatctgtccagctgcaaaaaaaaaaaacaaaaggtgtgctgttgtttctgcacttctccctgtcctcatctctcaacatcatatgtgtgcagagaaatcacacttgttgctctgttgtctcaaaaggtctagccctgagtttgctgaggtgatgatgaaggttgtgtgaagctgtgtcaaacactgagaaacatacacacaggctgtagcagatgtgtgttattccctcaatgcatgcaccagtgatggggatttagaatgagccactgtgcaaagatgccccagagagactattccctatacattattattcagtgtaagatacccaataaagcaactagataaagaaatgcctatatctaaacctaaaatattcactcactcccagcgttaacttccctcatccttaagaacaggctatccatggagctaccaaaatgcacttttaaaaagtgtgttcatgctgcacttcatattcatgctcccttttcccttgacaatgtgttatatgttgagaatctttaaataaaactgctcaaccaccaaaaaattatttctccccatttctattcatcagtacttcttatcttgaaggctgatttcaataatcatttatccctcacaacttcatacaatttcttccttttagagtcccactgaatatcatttatatttatcccacgctatttttttattctagtttatattattacttgtgaactttcctaatctcgtctcccaaacacacaaaccctttagctacttccatgggaggctatcttatctattactctccacacccccagccacgggatatgcaggagacactaatggatctagtatatcacacaggaagcagatcaccaggacgacaattacaatcagcaaatcccagtatccactaaagacagtgacaagggtaaaaagacaatagctgagagcgaggtaataagtgttcatgaagaatttcttaagcctcagcatcttagcagctatagcagaatgccataacaaagacaaaagtattttgagtgtgaagttataccatgacatacaaatgcatctgtcaatgaggccgttagaaatcttccagaccaaaggtcccaaacacccaccataaccttctgattcaatagggcacatatggggaaactgtactgttaaaaagcacttctaccaagaaaaggcaaaaaatgtcccctcaccactccttctcaacactgtactggacatcctaactaatataataagacaaaaaaggaactaaaaggtatacaggctgggtgcagtggctcacgcctgtaatcccagcactttgggaggccaaggagggtggatcatgaggtcaggagtttgagaccaccctgaccaacaagatgaaaccccatctctactaaaaacataaaaattagccaggcatagtgatgcatgcctgtaatcccagctactcatgaggctgaggcaggagaatcgctagaacccaggaggcagaggttgctgtgagccgagatcccgccactgcactccagcctgggtgacagagtgagactctgtctcaaaaaaaaaaaaaaaaaaaaaaaagatatacagtttgggaagaaaaaaattaaactgtctttgttcacaggtgacattatttgctatcttaatttaatttccaaagaattgatgaaaagcttctgaaactactaagcaattatagcaaggttgcagaagacaagattaatatacaaaaatcaactattttcctatataccagaattcaacaagtggtatttgaaattagaagcacagtaccatttacattagcacccccgaaaatgaaatacttatgtataaatctaacaaaatacgtatgagtcctatataggaaaactacaaaactctgatgaaagatgtaaaaataaataaataaatcgagtgatattccatgttcatgaatacaaggactcaatattgtcaagacatcagctctccccaaattgatctaaacattcagtgtaatctcatcaaaatcttactaaattattttgtggataaactgaatccatagttcatatgaagaagcaaaagacacagaatagataactcaatattgaaggaaaagaacaaagttagaggactcacactacctgacctcaagacttacaataaatctactgcagtaatcaagacagtgtggtatttatgaaacaggcaaatggatcaatggaacaaaatagcacagaaatagatcaccacaaatataataagctgatgtttgacaaaggagcaaaggcaatacactggagaactttcagtcttttcaacaaatgatgttggacatccacatgcaaaaaaataaatccagacacagatctcacactcttcattaaaattaactcaaagtggatcgaaggcctaaatgtaaaacacaacactatgaaacttctagaaaataagagaaaatctagatgatcttgggtttagtgattttttttatttttattttttatattgattactgtgttccaggatattctaatttactaatttttattttaatttttttctgtctagtctgattttttaattttaatttttatttcaattgttttggggcgacaagtagtgtttggttgcatggaaaagttatttagtggtgatttctgatattctggtgcacccatcaccagagtagtgtacattgtgcccaatgtgtagtcttttatstctcactcccctcccagccttccccctgagtccccgaagtccattatataattcttatgtctttgcaatgacttttaaaatacaacatcaaagggatgagccatgaaagaaataattgataagctcacttcgttaaaataaaaatttttttattttgctaaagacaatgtcaaggaaatgaaaagacaagttacagacagactgggagaaaatatttacaaagacacatctaataaaggactcttatccaaaatacacaaagaactcttaaaatccaacaataagaaaatgaatgacccaaataaaaaatgggcaaaagacctgaaaacacaccttatcaaagatatacagatagcaaagaagcagagtaaaagatgctcaacgtcatagacttatggaatttctgttaaaacaatgaaatagcatgatacacgattgcagtgcagtagagcttcccccaggaatactgttcccagacttgtgcagggctggttccctcactctttgcctttctgtttgcagcataaatgccacttcattgaggtgttgaggattccctcactctgtcccttccgcctctcaccacaagcacctgctttattttactatagcacctgctctttttttttctcatgcatttgcttttatgctctgtccattcattcctacagatggtgagctcctgagggcaaggcccatgcaggtcattttcagcactgcaccctggcctaacttgccccgtgcacaggtgagtgctccaggcacagtttctgaatgaataaatgagagtatcgaagatcccccttcccacctgtgaggagctcacattgtggagatggatgctcacaggagatgcaagttgggtgggaggcagggggacacccagagtgaccctgggagtttctctggctgcagccgccccattgagcagaatgggcagcgcctcccctgatggccagcactgaagacccaggcaaggaacctaaaaacaaagccctcatctgggtgtgggtgtcctcaaggcagtaggactcccagggctgaggggggcaatgaagggggagctgtaagctccaggagagataagaggggcgtcggaaggctcccttgacccctctttccctccactggccctgggggagcccagtccactcataaggggggtgtccagtccaccccatccacttccaaacgggggcccgaggctgcaagcaaggacgctcccctccacatgcagggctcggcctcccctgcaccacccaggacccccgctgtcctgcaagccccagccgctctgggccaggacccagggagtggaaggcattttccaagggcacagtggctccctgacggggaaccaaggccaggcacgcttctcccagactgggggcctcggggcacctgagaatggccatccttggtacaagagagcggggacccactcccgcgcaccctgtgccccaggggacgcaggactctgcaccctgaccctagagcttgccctaggatggcccggccatggcgaggccctggaacggtgaagactctctgcccatcaacctagcacctctgccctaccctcagtcgcatatgcacccggtgcgagggagaaggcaaccaggaggtcacacctaaggggggggcgtgagcggcaatgccagccgattgtaaaaccttccctgctcctgcgtggctctgcaagccaatcgaaaattccgtcgtctatgccgccagccaatcaggatgtccagagcgcggtgcttccagccatttgggactccagctggctctgcgcctccagccaatcggggtgcccgtccttaatacaaccagccagtcagtgcccggcgcgcgacaccagcagccagtcaggaagccctgcgttcatgcttccagccattgtcggagtgtcagccgtcacaaggcacttccagccagtcgcaacggcgggtcgccagcgcckcagtagctcgcgcggtgcctgtcggtagtcgcgtgcggggcggcggggcggcggggcggccggcggcggccatgggagatatcccagccgtgggcctcagctcctggaaggtgacgcggtcgcgggcagggaggcgcgcctgacctaggggagcgcgggacttgggggcgcccgatgggacccaggccggggctggggagaagtgcggcggcctcccctccgcctggccgacgcccgggaaaggcgctgctgaggtggccgcccaccgcccacaagcagcccggcccggcctttcctaaaacggagtcggtgctgcccgccgaggcgctctctgggagaagcgggaacctcggcagccaagcctcagactctggggctgcggccgcggcgttgggcggggctgctctgtggagaggcggagcccttgaagttactcagaactggagcggggatgccgaggggaggccttggcggcgctggactcggccggaacagggaacctcgaagcctcctctccagcaaagagagaaagaaaagttggggccgggcgtggggtgcgggcttgtaatcccagcactttgggaggccgaggcagtaggatcgcctgagctcaggagttcaagaccagccaggtcaacatggcgaaaccctgtttctacaaaaaatgaacaaatcagctgggcttgggggtgcgcgcctgtggtcccagctactcaggaggctgaggtgggaggatcactggagaccaggaagtcgatgctgcagtgagctttgatggcgccactgcactccagccttggggacagagccagaccttgctggaaaaaaaaaaaaaaaaaaagaaaaaaggaaaattggaattgctgattaggctttaaaagaaactttgggatctcatgttgttccctgtttagaagcaacctgccctgatgcctgagacatataatcgctctgtgcatttatggggtgcagcgtaatgttttgagccgtgtatacaattgcaatgtggttaaatcaagctaattaacatatctatcacctctctcagttattattgtttgtggtaagatgtttgaaatgtcttgttattttgaaatacacatgtgtagtaaattattgttgactgttggcatcctagtgcgcagtaagtcttaaaagctgtgtctcctgtgtgtttgaaactttgtaccctttgatcagcaactccccattccctccttcctcacctcccccagcccccagcgtcttataaccaccattctattctacgacctttctctgctttgaacttcacaattcctgccagtgatttgagacagcactgactaaaaagcgtttaaaatttgatctttaaaaaaaaaaagctaaacttagttgttgataaaagctataagaagtcatataggaagttagttactgaaggagtcagaatgttcaaggcctgctcatgaaaatattatttaaattatttctcttacctgcttaccaactcttagaggctaggagtgtcgttttgttcatattggttctcagcatctagtgaaggacgtgcatctgtcagcccttcattcagtaagcactcgatgrattaaactgttgagtctcttgcttccctttatttctgcaacaatttggtgcaggagtccagactttcgtgcacacaggataaggaaaaattagtgaaaactgtgcttaacaggtcaaaatattctatttatttttcttggactgcaggtgcatcaaattggattaatcataatcactcatcactggtctatgcaaaggcttatttttactygtctatttttaatagtgaataaacatcacagacctatccgttatctgttgccccagaaatgctgcatcaatggccaaacaccagacctcagtggtgtrcagcagcaagtgtattcctcccacacgggaggtcaggagagcagctctgtggaccttggctgggctcagttgggatggttggggctactccacttggctccrcacatctcctgtcctcgtgcggttagttagggagtgttctcaagatgatggctgaagcacaagagagcaaggggagcrgtgagatgtctggagacctcagcctgggctcttcattattaggggccacttgatccatctgtgtgcctgatcggtgctgtcttaattactacagttccttgataagcgcccatacctagtaggrcaggtcacctctccctgctgttgtagatttacagtgtacaatttgatgagttttgacagatgcatgtacctgggtcctggctttttattttggcaccttactctccactgtaagttttagaactagcttagaaggttccatgagaaactttattggggttttgattggaactacattaaatctgtagaccagcttggagataattgacayctttgtaatgttaaatcttaacttttctacaagcatggtattcttctctgttaataaaytgtcctgaatatggttcatttctaacatcttttcatatggttgtatagtttttcctgaagagaatatatgtcttttgttggaattattattgggttcttgatagtgtgttatactactggaaattatatttctctgaarttacattttctacttgtttcacctgctatattcattacacttccagccactttactaaactgtactrttatttctgttaatttgtgttacatttgtttggattttctacacaaatgatcatatcatcagcaaataatggtagtttactttcctttttttccastctttaagcttaaaattgcttcttcttagttgttyaggtgcttctggaaagcacctccagcacagtggccattcttgttttgtacctgattttaaaggatgtaagatggatattttttaatattgatactctttatcagattaattcttttccccgacttactgggagtttagattttgaatctaaactggtattgaatcttaacaaatattgattgarttgacttttgtttttgtacttyaatctgttaatattgatgaattacagattttctaatatcaaaccatccttagatatctgagatacactcaacatgggtgtggtatattatcttttcataaatattgttgcatccaatttgcttttattttacttatgaattttgcaacggtattcatgaataagatgaatgtgtgacttttaatatttttgtctgattttgattcaggrttatgctagttttgtagaatgagttgagataagtccgtctttttctgttgtttgaaagtctgtgttaaactgagatgatttttttcttgaaaattttatgaaactggtggttttctcttttttttgaattccttgcattctttaataattatgtaactattcaagctttattcttgggttaaatttttctaggaattttcccattttatctcatttttccaarttattgacatatagttattggtaatattttcttttaagtccattttatctgcatgttttactgtccattcgtgtcagttttttaaaaagttggcctcttcatcaacctagccagaagtctgtttattttactgaagtttttcaaagaactgacttctggttttgttgatcttctctgttacatctttgttttctattttattgatgttattcttaatcatatttttatctttccatccaatttcttgggttctttttctaacttaagatggatacttggttcattagctttcaaccactctgaatctgttgcctataaaatgaagataattatgctgctctaactcctagggttaccgtgaagctccagtgagaaagtggtttgtgaactataaagcccttgtcagtcttcagtttaatgagactgcaaacccgcccacccccatagtcttccctagttctagtcccttcccttgcctgagcttcatttagagtgactgttctcttttctgaactaccttattgcttgtagcattatacattcatttaggttttgttatatacttctttttgtatggataccttcgtgtgagtctacacctcagcctttattattggacgctgtggtatctgagtrtacaggataaatcttaagcctctttgcatctsagttattattcattctrtacttttttattgctttgatcattcaggaagcataccatctagctcagttttctgcagacactaaaaataacctatagtttttttttcccaaaatatgtaaaggagttggaacttagattattcataaattccttcataactgatattgcctgtttttagactgattatactagtaccaaattagtgacttaattytttatgtattatgttgtccacatgcttgggtgaaaggggagatttgtgttggattcctctgactgtgagaagacactttgttttgttggttttgcaggcttctccagggaaagtgacmgaggcagtgaaagaggccattgaygcagggtaccggcacttcractgtgcttacttttaccacaatgagagggaggttggagcagkgatccgtkgcaagatcaaggaaggcgctgtaagacgggaggatctgttcattgccactaaggtagggcttctctatgcaaggctggcagagcttgggtaatgctacatctctggagggctttctactttcttnatgggagttgatgactttgtttcatactcaaatcggaataaacaagaatattcacagcttcatgagcatgctgaattatattgtgtgcaggtttgtttcatattatttacttggtcattcaggtaggagtacacagatatcccccaattaacaatacattatcaaaattcagttagtgatgggcactttgactacagtggtgaataggacaaagtcctagccctcatgaagtctgtttacacagcgattcctaaattcagaatcactggggtgattgttaaatgcagattccaaattctaccccacatctgttgaaggagaaactctgggtgtggaggaagcagcttgagcacaggcataaggcaggaagcagcacggcaggtgcaggggtttgtaggaagcttggtgtattagtcygttctcatgctgctgtacgaacatacctgagactgggtagtttataaagaaaaagaggtttaattgactcacagtttcacatagctggggaggcctcacaatcatggcaaaaggcgaaggaggaacaaaggcacgtcttacatggtagcagacaagagaaagtgtacaggggaactgccgtttataaaaccatcagttgtcacgagacttattcactatcaccagaacagcataggaaaaacttgcccccatgattcagttacctcccactgggtccctcccatgacacgtagggattatgggagctacaattcaagatgagatttggctgtggacacaaccaaaccaaatcacttggtctctctggaccacacaatgtcaggttgcaggagtaatgagaagtgaggctgagtggtggataggctaagccatggaagttcagctgtgccctgtcaggagctgtgcttttacctagagacagaggagccctgtttcatttttaaatagggcagcttgtatcatatgtgagtgcaacttgtgttgtatataggatattttagtaggtgaaagaagcttgcatttgaggcagaggcaggaggccaggtaggagacattaacagcagtgcaggtggaagatgatgaaggcctgcactggcacagtgggtgagggagggagaagaggaaatggatktggagggtattgggagtcaggacctgtggaagatgcagagtggactacgatagtggagaattcaagaattcctttgcttttgatttggaagcagaatgttaagaccatgagatcaggagtcatgggttcatggtctagctgccattcaggagctgtgagtattagggattagatggctcaggctcacagcttcattatttgtaaaatgagactttggatttgagaatttcctgagtaacttcccagctaaagtttcatacctcaagattcaatgttgtttctatagttgaattgccttctgttttactttatggaagttaatgttcttcaggcaccattgctatctgcactagagcagagggtggtaagagagcagccttggtgtgtgcttggccaagcggggagaatgtcttctgaatagtccaggtagggatgtgagcaactggagatttctaaggctcaccctgcaatttggagcaagttgcttctgtgtggatcgtagtcagcagtggaaatatgttcattattttggaaatttggaaaagtcatagaaatgtaattagaaataaataaatcacacatataagcaccacatggagacaactgtgattaacaatggaatacatttacttccagcattcatttttttatttttgtsaagatactgtgctcgtttgttttcatttatttgattcccctttcttttactttcttttactttactttcttttactttactttcatgtttttcccttgctgtgatggagccttcaggttagcttatgtcacagtcaataaaagtaaaatgaggggaaaaacacaagtttttctacataatgagagtgtggaaggagatagctaaaagaagtaaggcagtgtgagctaactcacctataggctaacccacatggttacagtgccttaggaacagagaactcttaatacggagtctgtgtaagtgagaaacacaagatagagattcttctgatttttcgtcatatcttttctgcctgcaggaatttcattttcgtttttgtttttggtcccartgaatccaaataaccatcaaatatctcttggattcctgagcttcccttgaggaggagtcaggcagaaggatcccagctttggagcctctccctgcaggtgtcctggaactcttctgaggataatgtccctgtcctccyatcagaacttgccgtgttgtatttgtggtcatctcatcttggctattttgggttyaagacagtagctttgtggggctacagaatgggtgccatgctggctctgggtgggcacgtgtgacgctggtcccctctcctttgtagctgtggtgcacctgccataagaagtccttggtggaaacagcatgcagaargagtctcaaggccttgaagctgaactatttggacctctacctcatacactggcccatgggtttcaaggtaccrttcagtaggtagttcgttctgcagtttgcaggaccttcctccccgtgctcacaccctgtcttgcggtggggagagcatggaccagcattcagggcaggggttcccaggctgcatctgccacatgctagctgcggcatttgggcagtcctcttgatatctctgggcctcagttaaggagaggcttggcttgacctctgaggcccccacaggtctgtctttcaagccagtckctttttttccaagccaagagagcagtagatttttttcccttaggtttttaggtgaaagcagtgatcagatgaggaaatactgctgctcagagaaagttcccagtgaattcctaggccttgtctcttcttgcaggttctgttctctttggggagtaaatgctgttttgcaatatgggagatatttgcttgttcacctgcagcagggtccagtgggttgtgctggtagttgacttttccacttggttttattctcttaattgcttcacagtgtgtctggagcatgcatctgagccatggctctgtcactaagctaccccagtctggccgtgcaacttccctactctaggcaacctgcttctgcctcacacgggtcctggccaggatgtccctgcatatttgccctgggctgtgatgacagcctgcctgggcaagggcctgatcacacagttgacacctgtgaaatacagaagcccttgcagggatgttcttcctacaatggaatgggtgactgctgctcagcagtcttctacataccaacctgtgagaaggtccctttatgtgtgccacactgttggttactgttttagagtaaaataacaaaaaacacttcattcctagcacagctttacttaactaaggctttgtatctagtttccataaacgatgtgggcagctgtccgttagtgacactgactaagaggggaagatacccagagggcaaaaccagagtgwtgtctgtgccttgaaattcattgcatgcagaaaatcataattaaaacaatggctacagctgtattacactcattgccagccagcattgttgtaattatgtacccagaactatgttaggtactttacacatattaactcatttaattctcatgacagttctacaaagttgacactattaacatccctcttggagagatgatgaaactaagatacagaaagtttaaggtttaagttagattattggagcccagaagcayatgctcaggtcagacatttgttacactttccttgccctcatcctttagcagattcctgtctttggatttctgggtcgtagaaaaggaaaaggtctcagatcatccaacaaattacagaagagaataatgcagcatcgtcagcatgtcttctggccagtaggaactgctaggccttgtgtgatgctggacaattagatcagggtccgagtatgagtcccgggctgcaattttgtggaggcttggataaatggcaacatgggatgtggctttaaagtgagactgttagttacttcagctcatcatggaaaatgcctctttcatgtgtatcaggctggaacatgtgacattcttccactgttgtttaggagtgtgattaggtgtcattaaataaacatgcctatgccattcacccttaacatgctacgtgggagtacatgagggaggtagctggattgcacgtcagtgcttctctgaaagatgactttaggttcttgccctttcaagatgtwtctctctgccctctacctcctgtgtacctttgtattctcacttccttacctgtcatcatgatggggattctaagaaagaagacaagaccctaacagtggagttaggagagggttgattgggctctataaracatgaagaaaatgcactcctcacccattctttacccgaaattagtaaactattttctggaggcaatgggagaggacaaccttgcatcagtaaggatacagggtcttcctttcccatcttgtgagagatgaacagtgaacatcaggctggcagaggctttgccagccatccagtccaccagccattcatcttttcttagaaaggtgaagactgggcctggtcacatggccaggctggggttgcttagtgacagggctgtggcttggatgcaggtctcctgacacatggttttttttgttttgttttgttttgttttcacacatctcaactctccttcttcgcagcctcctcatccagaatggatcatgagctgcagtgaactttccttctgcctctcacatcctcgagtgcaggacttgcctctggacgagagcaacatggttattcccagtgacacggacttcctggacacgtgggaggtgagctgagccacaccaccaggcagcctcatcctgtgtgggtctccacccaggatgcagtgagccctgagctgcttgtrttcaaagacatcaaggttgtctacctgagatgtggggtttgtggagcaaamaaggaatcaatacccgaagaactcagagacctcagtgactttcttgttacctttggtttggtatggtgcagytctcttgacacatttgaggggtagctcattatagacctcactttttttctcaaatatttatttatttttttattaaaaaccatatttatttcagaaaatacaggagagttcttctgcattaaactaacattaaaaattttattttcctggcacccagcagtaaccactgttaatgttttatagttcctttttctctcaagcatttcagaatgataaagttggcagcrtggaagctcaggctggggaggtgagaccagtgtcggggaaggttaccaagtgtcagcccatttccagggttcagaccaaaaacagccctttactgcaggggcttgcagtaaagacttgagcaggaaattaagggggtggtggatttgagaggttcctggaagtygacccacaggctggggtgggtctcaggcttgggctccagcatggctgaccgagcacgtgtggtcttacagtcttgctaaccatcatgtgggatgggacatcacatttgaggcccaagaagaaagtaagcttaagcttaagcttgctgaggttaggacagagcttgctgggtgaagctctccagggaggaggccagagggaaccctcggacagggaggagtcccaggctaggctccccccatcaatagaagacaaagactgacctaaggtatctgagatgtcaggaccagggcccatgggcctcaactctttctgtcacaatgttttakgtcctaaaagatttgggttaaactctagggtgctcatgtagcaccagcgaggttccggtgattgttgcagagtkgaggcagtaactaactgctgcgtgttggcccattggtcactcaggacttgctgctgactacggaccctggcacgaagctatgctcttcctgaagctcmggggcagcctggcttgctggtcagtgaccagctcagagctttaggttgctctgccctaaagtgtcttaaaatagtaagtggagaaggtgggataggagaatggtgatgtatccgtgtgcttaagaaggtcagtgtctcagtggaaagaaaggtgaacaaataaaatccgcagcagacatgcttgccagacatcaggaggaataggaacaagaagagctcacatgtgtcgagtactggacgccagccttagctgacacttcctgtgattccacataasccctaaayatccccgtggcacaggccatgtagacctgtccygaagctgagaarattggggccaagtgaggccatgcaacttgcccagcatccyctagccagaaaagatgggactgaaatcagaccttgagtgcagaaatgcttttgaagcttcaagtaaaatattgtaaaaatattgggtccaaccagttttagaataccatrcagaactgctgagggacgtagattgtcagtgcagtagacagaagcttcacacccagcagagtcgttctcttataggccatggaggacctggtgatyaccgggctggtgaagaacatcggggtgtcaracttcaaccatgaacagcttgagaggcttttgaataagcctgggttgaggttcaagccactaaccaaccaggtaagccgatggaagcatcagagagtttaacctgtgtggctggtcccccagctgccacctccacagggctcttctggaaatggaagaatgggtgaagcacaaaacaggcctgttctcctctggcagcactcagaatggtgaytaaaggcagcagctaggcaagtggctttcttgaaggtgcatctgggtagatggtactgttggcaggcagggcatgagctggtgcttggccctccatgtgcagtgcaggcaggtcaccaggtgtactcagaagcagtcagggtcctggcaggtgcctcacccttatccaggaacatgggcctcccctctacctcttcccagcctgcagactgcagcaagaaagagtggatgactagatggcttcacgcsaggctcacaggctgctgaaggtgatgcaggcacttcgtttttttaatgcagagaaaagacttgtggggaaataactattgtattttctagactagctttgtatgttcaaagatcatttatacagtacttaagctttttattgaagagtagaagtgcacatgtgaaaatggaactgtataaattctcataaactgagcatagctctgggacyagcatccagctcagtaaacagcacgtccagtgcccctgtaacccctgccgagcacagcatcattcccattcccagcagctgggattcacgtctgaacttyacacaggtaaaataaaataataatgcaacataaacccctctgtgctcgcctctttcacacagcactgtgtttctgtacatgtgattgtagatagtgctctcttatttcttgtggtattctgttttgtgaattaaccacaattgagttatccattctgctgttaatgggcacttagacagtttccagtttgggactattaagaatagagcatcatgttctatttttttgaataaatatgctttttaaaaaagttctgtatggagtagatgcagaaaagtgtgtgaatcataaaaggcatacatagcttgatgaatttttgcaagtgaacaaactcaagtattcagcacccagaacaagaaaaaagccctcagccattcagtagctcccctgggtcctgttgtagccaccaccatgaagagcaacctggcttctgacccagcttctcatgtagttcagctttgccttgtatacaaccctatatatataagttttgatatatgtttatatggatagtagcttccgttttgtgtcagtatttttagttgttcagcactttaaatacctgggaatgattatggcatagtctgagtagacaaagtggggtggagggtctgctttctgttaggttgatggacaccaggaacacaggatgcggaaggctccagaagggctggcctctcttttggaggctttccaaacaggctgatcttgatgagcttggcatgttcctgagagcaaacgcactattcatagttctctgtaatttacactaaataactatttattttaaatctccttataacctggaattatatgtgagagtttggagaatgtgcaagagacagagatcctgctctctagcttcttaaaattttcattcaagtcacctgtagaatgtatttgtcacatgtagttcctcaatttcattcattcattcagtggatatatttttagcacttcctacatgtctagattgttcttagtgttggtgagacatctatgaacaaaacaaattcaaacaaaaatctctatcttcatgaggcttagatcttggtgacacagaaagacagtragcaaatatgtaaaatctatgagatgtcagatagtgatagatgctgtagaggaaaataaaggccgggggagatgagagctatggtgtgttaacaatctttatctgagtgctcagggaaggccctgcagagcaggtggtattggaacattcagatgatgtaggtgtccccaaggccgtggactcagagaccatgacacctgctggcctcttggagattgctctgtccagactyctcacaacasaaacacttaggcctggagctgggccccatggctastcrgtgacagccaagactttgaygcaggtcttctcttgtagagcttttcttgaacactagtggtctgaattttatgtaagctatgattctgttatagattgagtgccacccrtatcttactcagaagaatctgatcagtttttgccaatccagagatgtgtccgtgactgcttaccgtcctcttggtggctcgtggtaaggatacctcagtggtgtgttagtcagagtccgactgggaagtagatgccaccttctcatttccttgggatgaytgagggagggcttaatggaggttttgacagggtgtggagggatggtactatagggggctgtccacacctctcaagcctgggattgaaggcatggtttattattggaagccagggagtggctgtgagtgggctgccctgggagggtcaggacctcttcagggacgtaaatcagcctggagtgacccctttgctgagttccccaccagggtgtcagcccccttctgacctcctgacaaggatgctccccaggcctctccatggttggatgasgcaaagcctgctgtcatctttacccaggccctcctgcagctgtactgtgctcccaagatcagctaagagacctccagccattcagccacctaagccagaagcttggaaatcatcccttcccacatcccgagtccaatccagcaccaaaatctattgattattctgccmrgagaagttggactttgtttcatgatttcatttctgccatcactgtcactgccttagttaagtagcattcccgaggtcattagaggagcccctcagctccctccctggcccactccattccaatccattgctcccagtgggagctgaaaggagctgtctctttcctttcctatgatcctatcactttcctgggaaaaattcttcaggtcttggtgtggcctgtgagatgcagccagcctgacctctgcctgcctctggcctcattccttcccatccctgtgaacatcctgggcttcagccacatgaagctgctgtggggtccttggatagaacatgttttctcacctctgtgcctttgcaaatactgttctctttacccacaaatcttttttttttaaatctggcaaactccagtttctaatttaaggttcagtccagcatcatcttctccaggaagccctcctgaccccttatttatgtttcttacacagcccttgtcacactgtcttgtgattttcttctcagtcccttccactagtcaaagcaaccagagtgcagrtatcttatttattcttctcttcccagcttctagctcagcacctgggaaacattgggaaccccgaaaaggctgaaattacttgagttttatcacctgtgtgttttccttgtgaagtggggcatgtgtgtttgaacttggaaccagctggagagtctctagaaggctgggtccattccacagctgagctttggggtagcggatcctctgatggagtgagtcagggagctctcagactgactggggtgggcaactgggcactctgtttggttccttcaggagacctcgaggacgatactagcacaatgcctgaaacagggtgatggctcagtacacactcgttaaaaaactgaatcctcagagttctcagggcccacccgtgcctgagcagaggatgcacagggactctatgaccatcttcaaaaccacttttaaaggttccacgtgttcacaatattcactttttagtagtattttgggcgaacttttctgaaagtatcatcatcaacaaatatcgattcgctgtgctgtgccagggtgtacagtagaagctgagaagtcagagagccctgagagtcgggggagtcaaagcttgagagcccactggctgcatgcgctracatggccacctggttyttgaggagaarcaccaaatacacawgaaaagtgatgtcrtgtagccttgttcaccaaagtgttagcagtggttatctccatactggaaatgtggggcgatgtgcttttctgcattttaaaatttcctgtagtcggcatgtgtcatgatcagaaaataaatctttcattttggacaaagatttcttctttctaaagaaaggggcatccatgttggatctcctggctcactcccctgtactgtgtctctctagtgagggggttgacctgatagacaaccctgtgatcaagaggattgcaaaggagcacggcaagtctcctgctcaggtagggagggagggctsttctgagccrggtggggttctctgaccgctctacatccttggggagtcctggggcttggcaggtcccaggaagggactggctcacccaggtgagtccatgactcattagaacctcccagcgtcaagcagaatttggtctgcagcygcattyctagtcactcaagccatgtactcttgyctccgagcctgtctagactcagaggaggagtttccaggccttctccctctgccccaccaactgcatgcatggttagtmtgagatggtacagaaaagttatttattctagtcttctttgttctaatgtccagtggggggctgggcgcatgttaaggaattctcattaagcagattctctgatctcctccttgggctgatggctktcattaccaacatattgacagagctgctcagtgaatgccagtaacaatagctgctgtcattgattcttggactcttactgcatgataaaactcacatgttagaaaataacttagactacatgggatttccctttgtgtgatagtagactttttgtttccttgcagattttgatccgatttcaaatccagaggaaygtgatagtgatccccggatctatcaccccaagtcacattaaagagaatatccaggtaggtgtattccttcttttatttrgcgggtttcagatcatgtgttagatgggaagggatgactgctgtagcatacagcctcagggtygcggagcttgatgcarcaggggcytctccctctgcactgtgggtgttggtggttgaccttccctcagcgatcaaaggacccaggctccttccatcttagggccctttctcccctagggtgttggtgtcttctccatccagcccaagattaggaaggagggaagagcatcttgttgggawgatttgtgtgggccaggctggagcatgtgcaccagtcacatggctgcgctcgcccacaggggaggctggatgtctcctaagcgtgcactcaggagaaaggggaggcagttggtggacaggtcaccacctctgtcgcatggaggcatgcccacgtggcctgagggcactgctttgagttgtgtgggaagattctggtcctgactcctgtctagtgacttctgagaggcaggagtgaagactggaacaggtggagcgtgtgcagaacacagagaggcagcggtccttttcagggcaatcttttcacctaagccaagaaccacagaagtgtgtgaagtgtgtgaaatctatttttggagctatgtgaaggaactctgtgtggcttcaaccctgacgacatagtctgtaacccagtcagggccatggacttgggattcccacagtctcactcacgatttaactgctgcatgacctctctcagcctttgtttcttcagtagagcacccttctgataggatcactgagggtgaaatgtaatgatacagtgaagggatagcatagtgcctggcgtatggaagtacctgatgctcttagctgccagtcaccctcagtcacggatgtcacctgtgatgatctcacaggcaacgacaggcattggtggcagcccacacccattgatcatgtcagcataggtgtgtgtgatcctggggccagctgcacagctgcattttcatagacagcatgtgcccaggagtatgctccctcttggtgtctgagctgcccatgagctccacaaggcactgctgcatcctgagggctcggtttggttgtgccaagcaagcatcgccattggggtttattgacccatctgtaacagtgcctgtgccctcaggcttgctgtgcatgccaagctggctgcaggtgggcatagccctgccattggcaggagaggcaggccacccacgatgggaggaccaggggatgggcaggttcctcatggtgtctacagcactctccctgccgggcccttgtccagctcacctgctgcccgcatgcccttctcctctcctttctcaggcgtcctgctctttgaatggcccagagcagctctgggtgaccagccaaccttaagcctgaaaggtatggatttggctaaactgtaaactcagttctctccaatggctgctgacgggcctcttggaacgagactgcaggtctcttgtagtggttagaattgagcactgctgactgaccggcatctgctccacatggtgtgtccggaattggtgggttcttggtctcactgacttcaggaatgaagccgcggacccttgcggtgagtgttacagttcttaaaggtggtgtgtccggagtttgttccttctgatgttcggatgtgttcggagtttcttccttctggtgggttcatggtctcactggcttaggagtgaaggtgaggacctttgcggtgagtgttacagctcttaaggtggcgcgtctggagttgttcgttcctcccggtgggttcgtggtcttattggcttcaggagtgatgctgcagacctttgyggtgagtgttacagctcataaaggcagtgtggacccaaagagtgagcagcagcaagatctattgcaaagaccgaaacaacaaagcttccgcagtgtggaaggggacgggagtgggttgccagtgctggcttgggcagcctgcttttattctcttatctggccccacccacatcctgctgattggtccattttacagagagccgagtggtctgttttgacagggtgctgattggtgcatttacaatccctgagctagacacaaaggttctccacatccccactagattagctagatacagagtgtcaacacaaaggttctccaagtccccaccagagtagctagatacagagtgtcgattggtgcattcacaaaccgtgagctagacacagggtgctgattggtgtgtttacaaaccgtgagctagatacagagtgccgattggtgtatttacaatcccctagctagacataaaggttttccaagtccccaccagtcaggagcctagctggcttcacccagtggatcccgcacggggccgcaggtgaaggcgcctgccagtcccgggcggtgtgccggcactcctcagcccttgggtggtctatgggacctggtgccatggagcagggggcggtgctcgttggggaggctcctgctgcagaggagcccacggagggtcaggggaggctcaggcatggcgggctgcaggtcccgagccctgccctgcggggaggcagctaaggcctggcgagaaatggagcgcagcgccggtgggccagcactgctgggggacctagcacgccctcctcagccgctggcccgagtgctaagcccctcattgcccagggccagcagggcttgccrgccgctccgagtgccgggcccaccaagcccacacccacccggaattcgtgctggcctgcaagcaccacgcgcagccccrattcccaccggcgtctctccctccacacctccccgcaagctgagggagccgactccggcctyggccagcccaggaaggggctcccacagtgcaacggtgggctgaagggctcctcaagtgccgccaaagtgggagcccaggcagaggaggcccggagagctagtgagggttgtgagggctgccagcatgctgtcacccctcaatgggggctgccagcatgctgtcacccctcaatgggggcctggcctaaggtgccctctgtgccctgcagggcagctaggattgcccctgggaggacataggctggggaagattatctgaccctcccatgggaggagccaccgagtgagcagctcagcaggtggcagggggccacatcgccccagttctgcccttctgccgtcgtggctctcaatgcccgggatccccatggcctagcaaaagtgaatgtgacacggggaccttgggcccagctgagatgcccccattcctctgttaggtctgctacacactgaggrgaaatgccatcctcaggcagtgagacaggaccaggctgacgtgagacctgagggccaaagccgaagtgatctgatggctgaggacagacagcagcggcgggttaggaggggccggaggaagtgcttatgctgtcaggaggaggtgggagccrggtccacargactcaccagggaggagaaaggcatccagtgcagggggctgccccggcccgccccctgtggccccagtgccgytcagaactgctgctgcaaggctgcctaccctttataaggagtcttctagaactgctygctgttccccttaaacccaagaatccgcctaccccggccccagcactccccactmcctccagatgacacgctgaggctactttctcctgccctcaggaggggaaggctcttgtggggaagagcctggggtgctccaggtccttgcattggaatcactcagtgcacccctcctcccgccgcaagacagccactctgcyaggccggggtggatgctgatgctgtggccatgggtcctgttcctcagtgtgtggggacaacaaaaggggagggaagkgctgagaagaatactattttcaaggaagaaaaatggatcactcagaaaatgtactctgtgatatgggtactgttagagttcatagtcccagggccaagtgggtccctagttggcaggtgtatggaacaaattgttttgttggggttttgaggggtagcagagtcagtgggaaaaattctgtgccatccttttttttttttttgagatggagtctcactctgtcatccaagctggagtgcagtggtgcgatctcggctcactgcaacctccacctcctgggttcaagcggttctcctgcctcagcctcctgaatagctgggactagaggcatatgccaccatgtccggctaatttttaaatttttagtagagatggggtttcaccatattggccaggctggtctcaaactcctgacctcgtggtctgcccatcttggcctcccaaagtgctgggattacaggcrtgaaccaccgcgcccagccgctataacttttaacaattcccatatgtcctttattccactaagatgagtgcagtatatatttccatctgtccaaggcttcctaaatgtagccaaggccaagccaacaccagtcacatgatcaaaatcaaagggcatttggggaatccaggctgtgattcagggaagttccaagtgtctgatgaagtgtttgttttacatctttgtgtcccttgcaggtctagcactgtrctatgtaggtaacatgtgctccattaaatgtgaattaaactaagttttctacaaacattgtgttttggttccaggtgtttgattttgaattaacacagcacgatatggataacatcctcagcctaaacaggaatctcygactggccatgttccccatgtaaatatggctccttctttttaaaacagagggaagaatatacagattgaatkattggtgtctgaataggtatttatcatacacattttagattaattaaacyttctcattataattctttcctgtttgaagatgagccactgaatgaagctaatttcatgcactggggagtttaaaagtatataccatttaaaatgtttctcttaaaaaataatcaytctttgttcctatttttgattkgtttttctgtttttcagaactaaaaatcacaaagactatcctttccacatagratactgaggacgctwccccttccttgtttctgctcagcccagatgcacagacacyattggcaatgttgaccctcctctgtcatcacagcgccagggcagctgtgcctgggacaggagccacacagtcagagggggatgtaagagccaccttctctgacaaatctggagaattgagtgtgttctaagtgaaggcaatggggtttctccaagacagcctgtgtggcctctactctgaacaaatacactgatgagtcatcagtgaaatttgccttcacattttaagaaaactttatcttatggagttatttaagccatctacagagctgaggaaacagtgtaatgtgtctctgccccattgcgcagctccacccattgtgccccaggccagcccgcgtcacmtacacttccttctgtgccctgccagtgaccyccaggttattctaaagcagagtccttcccttcccccagtgagaaggaaaatgggataagtctgggacactgtttcagttcaataaagaggcttttttcttccttaaaaatctgaattttaatttctttttttttttttttttgagacagagtctcactatgtcacccaggctggagtatagtcaagtgatctcagctcactgcaacctccgcctcctgggcttaagtgatcctcctgcctcagccccccaagtagctggttaattcctaaatactagtttttaatacggtcttctgataagtcagattatacctggggaacccccatagcggagatgaaatacagctcactttctcacatctgctcattcagcctgtttagattcatgtatcagaaggaggccctgcagagcatggtgttcacgcccaggcgttggtagagggtgtgggttaatggacttcctgtggtccagacgccatgatccctgtctttgctgtctgctcagtgaatctggcctagctcctgtgccctgggattcataccggatctccagggatataacttctcaactcacaggcccttggctcctattcaaaatgagttaagccagaaagaaattgatgtctactccatggtctcttcccgcttcttgtgtcccccacatcagcctccaaacaagcctctcatttcctcctccctctgcatcaggttcagggaagatatggaggtgttgcccagtggctgaaggggactgtttggggacagttcccctccacatcacttcccattttcactctatcacaagcaggccagctgagtcagaggtgtgggttctgcagataaaagttgtgcttttctagctctgtgatcctgagcagactgcctcacctcccagccttcagtgtccttgtccactcagtggaggaattgcagcacctcccggttgtggagacagcatctggcccaagttatgttctaggaagaatgcattgttactgcgaccagtatcattgccattgcctcattcctcagtttctcatccacctccctgcccagccttccagatgtgcagggaygtgtagaaaccttctagcttggcctcaagagaggactttgctgcgggtgtcaccaaaacgaaaagacatgactggtgcaagagcttcatgggagcctcgccctagtgggggtaggattgagggtggggtgtcatggtttgaccaaatttccagggagagtttaatcagaagactgtttacaaaggactgaggaaatgggagagtctcttgaccttcctacgatcaggccctgtccaccaccatggacctttaatttttccatgttcgtgactccttatcattcattagctgtgtgactttgtgcaaattacttaaccttttaaacctttaaactctttgtcactgtctacctagaggtgttaggattcagtggcatagtgccatgcagcaggtgacacagtcatctgcatgtagcactcttgtgaacacatgcgtgtgtaggtgtgtgacttgtattttatctcccacagagtcaaaaatctaactgctattttgtgaattttccttgtcacttatacttaaaccattgttcattgaccttaaaagtagagagtagaatggtggttaccagaggctggggagggcaggggtggatggctgatgaggagaggttggtcagcaaggacacagttgcagttgggaggaatgagtctcagcgctccattgcacagtagcgtgagttggttaacagtaatacgtcaggtgtctcacgatagctggccaatgaggatccactacgttatttgcatttcatggatttacttccagccggcatgaaaactgagtgaagctggccaccaggtggcgctgggaagcacttaatggtccagtgcatctgcggctcttaacaggagatggcagccttttactgtctttgattttaagacctcttcaactttgtacaatcacagtgaggaaggaaacaatggatagcaaaaataggcaaacactgggcaactgcaaagcttaaaaagtttcacagaagttacgcagcctcgttcttgagcagtatttcccagttcccttttcagatggtaattgataacccggcccctcttgtctgttcattctgagtggagctgacaagccctccccttctttggttccctgcttttctctagggaatgtgacttctgtgtaagttcttccccactctggggcctggagaccaaggtccacagaggaggtgtaaacgtgtgcccttaagggaccctctgcgtcaaatgattgtgggcatctctcctgactttaagactgggagatactcagatactcgtttcagtagctgcttctcctcattggcactttcgtattttatttgaatggaaaatccaaggataagtggtaatcaaaggcttaaaaagctggaaacagattcgggaggtgtggatgggcatcaaatgggcatcgaggagcaagagaccttggggaggatggcagggcctcgctgactgatggcagtttatgtttgattgttttgagaaactgccaactgtttcccaaagtgcacaggcttacagtcgcatcagcaatgtgcgaggttccggtttctccacaccctcgccagcattagttttggtctgcccctgttgttgttacagctgttttagtgggtgttcaatggtgtctcattgtggatttcattacaattccttactgcctaatgatctgagcatcttttcacgtgcttattggccatttgtatgtctttggtgaaatcccccatggcattcctatgagttcactgtgggtgccgcagggtgactatgtgcacaatcttggaactgtgcatttagacactatttattagttcccaactttaatcaatgataaaattcgcattttagcacgtttatttctccatcttttctctttcttccatttctccttttcttcacacagacatctaatatgcaccttaaactttatgtgtctaaaacaatgcttcaagctcaaccccagctctccaacaagctttctttattgttattccttagttataaagatgagggagacttggtcttgcccttaaacacccaagttgaaatgggagaggcacgcatgtggaggcgatcacagaacagtgacatgtgatgtgaccagctctggctgggtttgggcacattttcattttatatcatgaaattgatcaagaccctgtgtcttcattgtgttcctttttcttgttatgcagcatattttcacaggactgaattcttttacgtatccatacactggggcaaatcaactatccagacctaggttagcaacattagatgatgtgacatccaccatactgtggtcattgtcactcccggttggattctgctctgggcagagagggctaatgggcgtgactctaggcccagtttccatagcctggcagtcctcactaggaggctagagctggactggaagcctgtcttcaccaactggtttctggtactttgaacacatggagaacaaggaaaactacaatttttaatgtgcacttctgtcacgtatcgcctctgccacttagaattatatccatgctccaacaccaatccctccctaacattagctagtactaactcgatgctttctgtgtgccaggtactattctataagtatgttacaggttttaactcaatcttcacagaaaggtaggatttaccattatttctgttttataaatgaaataaccaaggaatagagaagttaagtaaattacccgcaaatacccagctagtaaagtgatgtaagtagaatttgactcgggaaatctggcttcagaggctgggcttttaattacataccatgtgggaaacagttaactaggtactctttctcttggaattaatctttttaaactatgtaaataagagggtgagacttttggtgttgattcccgagaagataggacacattccaccccacaggactggcatgtggcccagtgacagtgccagaccctttgaacacacagctccattccatgtgacgccagtggaaaatcaaacatttcttggcagtattgacgagtatttggatgaaagaaacagaagagctcattaaacctgcaaaactctattccaatggtgaccagcattacttcacctgggaaatcattgaaaaacaattactgtgagactggattggtgagtcacacgagttcaagccattatatgcttaatttacttccagccctgattttaaacagaggcggtatatttaaatcagaaggagatacggaaacagcaatttcttggctagaaaaatcagcatctctagggggaagtggaaaattctcaaagagctgaagagcatgaaaaaggctccttctcttgtcaagatagatcacggccctcattagtgaagaagattctgcaggcacaaagggccctgaacaaatgctgggcaacaacagaaactgtggtgcgattaattcttgtaaaataataagacagaaatagctccatcaatggaaggagaatacagttagctagagactacccaaaggaagagaatctctgaaattaagttagattaagtgggattgagttgtgacagctgcagggaccttcaccactgtgccaccccacctggtgtctaatgaatttacgctgaagcaggttaggacaatttgcaagcagaaaatacaacagagatggatgggcaaggtctgctggaattgctgctgcttttttattttcattttattttgttgttgttgttctaaaaatattttattcttttttttggcttacacggcagaaatccattttctcacagttttagaggctagaagtctagggtcaaggtgttaacagatttggtttcttctgaggcctctctccaggacttttccttctgtgtcctcacatggtcttccttctgtgtgtgtctgtgaccttgagggatattttaaagctgaagagataaaagaggttgtggggctatgtcttaagacaaaagaacatttagaaaacctcaggaaatgatcagagtgggatagatgttactagaagaaacaaagaaattgaattcaattaggagttagaatcatttacaaagcaatggggaaagtaagcccctaaaaactattgtagcatatagtaaccagagccaaactctcataatatattccccaaggcaaaagaaaaatatttacaagattggcgttgttttatatgtttgcaaacttatttaataagtctggctttgtagatttcatatctgagtctgcattcaatcaaaatgtcttggctaaacttcatgaaaaaaccccagcctcataaattagtagttggaaaaaggaggcatatttagagctttttcagataattgtatttctttgatacattagactggacacacagtagtttgtttaaggttaattgcaatattgcaatgaggaacttgttgccaaaaaaaaaaaaaaacccaaactctgtaaaatatctgaagagattgattctaagccaaatatgagaaccatgacccatgacacagcctcaggagatcctgaggacatgtgcccattgtggtctggttacagcttagttttatatgttttagggagacataagacaccaatccgtataagtgagatagactttggtttggtctggaaacatggaacaactgaaagtggggacaactgtcagaggcatttaaatcagagcaactccaccttgaataggggctgagtaaaatgagactgagacctattgggctgcattcccagatggttaaggcattctaagtcacaggatgagataggaggtcacacaaaatacaggtcataaagaccttgctgataaaacaggttgcaataaatcccccaaaaccaagatggcgatgagagtgacctctggtcgtcctcaatgctacactcccaccagcgccatggcaatgtcagggagctaccctatagggtctaaaaaggggaggcagaaataatgtactccttgtttagcatatcatcaagaaataaccataaaactgggcagccagcagcccttggggctgttctgtctatggagtagc

SEQ ID NO: 95072 - DNA, 13555 bp, Homo sapiens
agaggcagagaaattgattgattttaaggaattgtaacatgcaattgtgagggctggcaagtacaaactacataggccaggccagcacgtatagtcgaatgagagttgctgttgcagtcctgagtccaagttccacaggaccacaggctggaaacccaggcaggatttctatattatagagaagaattccttctttggaaaatcactgtctttgttcttaaggcctcaactaatgggatgaggcccacccacattttggagggtaatctgctgtacccaaagtctattaattagctatcaatcacatctaaaaaccaccttcacaaaaatgtctagattggtgtttgaccacataatgggacactatagcctaaccaagttgacacataaaattaatcactgcaccagctaaccctaactttgcttctcacaaccagaggaattatttaatattgtcatataatgaaattatattactttttaaagtcattgcttcaggttgacatacaaaaccatttcaactttttaaattgatctgaattgctaatatgtgcctaatttttataaataatcccttaattttatttaaaatgcaacaaaaattgatgggaaaaaaactgtgtgtgtatgcatgtgtggtattaggggtgggaggaagagattacctggcaaaaactacaattttattctgtagtactagtcaatgcaatttagcactaaatttttaaaactctcaaaatcaaacatatacagagaaactagaaaaatccaaagatttaaatccagcaccaatatgttccctgggttatataccttaaattataccagataaactaattctggaagagaaagcaacactattccctatgactatatgctagcatatggctttcaaggaaacaaagaacagcagtttcaccaaactttactttgccagcactttccccccttttccagaggagaaaagaagtataaaaaataatagcaaaatatgtcaatttctataaaaggctcatagttacatgagtttgtgtggataatcttgtggttacttaaaataataataataattagtcatagcagtatcctctctccctcttgactttgacttctctagcttacacattccctctgtgaggctcagctcaagttcacatgtaaagtcagcagaaatgtgaagctctgctgctcaacactacagccaatacagctgtgcatcactcagcacagaaaacaaagtggttgtatcttcttttgttaattaatttttacattttttcttctttattatgaaatctttcaaacacttaaaaataagtttgtacctaacactcagatctaaaaaatgttaaatttttaactgtttcagaaacttttgggaaaaaaaaagaaaaatgacagatacagagaaaacccctctcacttccttctctagtccttttacctgaattactcattcccttctacctgacaccctccgtttccagacatgattaatatctcgatagaatatatatccttcctatgttgatttttattgctcttaaccacataaaattttgccagcaaaattatagggatcattttacattatttttaattttgtatgaatacatatttgcagctcaattatgtatgtatgtatgtatttatttatttatttattttgagaccgagtcttgctctgtcgcccaggctggagtgcagtggcatgaactcagctcactgcaacctccgcctcctgggttcaagcgattcttccgcctcagcctcctgagtatagctgggactacaggcacacgccaccactcagggcgaatttttgtatttttagtagagacggggtttcaccatattggccaggttggtctagatctcctgacctcctgatccacccaccttggcctcccaaagtgctgggattacagtcgtgagccactgcgctcggcccaattatttatttattatttatttatttatctgagacagtctcttactctggcacgcaggcagaaatgtagtagagcaatctcagctcactgcaacctccccctctcagactgaagtgatcctcccacctcagcctttcaagttgctgggactacaggggtgcgccaccctgcccagctaatttttggagagatggggttttgccatgttgcccaggctggtcttgaactcctaagctcaagcgatccacctgccttggcctcctaaagtgctgggattacaggtgtgagccaccatgcctggcaattaatttttaatttaaccttatggtttcaaaatgtaccaaagatgattcatgtagatctagttcatttaatttaactgccagatggtagtctactaaatatatgataaattacttgtttctttcttgataaatatttagatggtatcccacttttttcttttaacaacagtgctacaaggaataatcttgtacatgttttcttatgcacataaaaaacagtagagcatccacctagaaatggaatttctgggatatctactatactcacagtccactttccttgatattatctaagtgtttttccaaagtagttgactcatttacacagccactgagagcatatgagagcttgtttctccacacctccaaaagctaagtattgtcgacgttttagttgtcagaggtctgccagtggtgactgtgaaatggtattccattttcaaatccattagcatgctccctcaactattcagattaaagatcttttcagctgtctatctttccagcttcttttttaaatagaatcttcagtttgtttgatttacccaattttcagttaggtaatttgtcttatgcttatattcattttcagaagacttttttactatagtaagataccaatattttgttgttacaaatgtcataaattgcttttcttcaattattattttttattaactttcttcaatgtctcctgtattacagagccttacattttaataaggtcaaggttatcaataattttctttaaacttttgtgcttattatcatcctctttaaaatatgtgattctcctatatttccttccaaaatctttataaattttttctcatattggggtctttaatctatctggaatttattttaatgtgttatgaattgcaaatttttaataaggataattaattttacctggaaccatttatttaaaactttgttatttcacaaccaattaataatgcctgaactgagttcttacatatgcataagtctttgtctgggttctttgttcctttccattagttggtttgtctagcctgtacaaatagtaagacagctgaatacttacacttttacagtttctcctcatatctgcaaagaatgtcttctcctttctcactaaaaaaaaggcttagatattcctgatcctttcacattccaaagaaattttagagttagtttaactgatactatatagggtttgtaaattaattggaggagaatttatttcctaacagtattaacttttcccatcaattaatatccagttttttggcattctctcatatccttcagtaaatattcaggtaccttttagtttttgtacctcttatgaatttgatcttagtttctgtaacagtttaagcatatagggaataaataagaatgtcaatgatttttatatattcattctatatccaggaacatgctgacctcttattagtgccaataattcatttataagccatctcagattttatatatacataattacatcatatgcaaataatgaaatttagtttctcccatgccaattctcattcttcttacttgttatccttgtcttactgcattaattacgaactcctataaaattcttgcatagctccctactttaatggagatcttgtaaggtttcaccattaatagtatttgctacaggtttagatacactttggtaagtgagcaagtaccttccttttcccagtttgtgaaaagttttcattacaaatgggtgctgcatttattgcatgagttttctgaatctactgaatcaatcataaactttttctcttttaatctgttaacatagtaatatattaagattaacaaaatttttaatattaagtcatccttgaaatcctagaatacatattatttggccatgatgcatttttaatattttgctgaatctagttagctaatgtgttacttagtatctttacatctatattaagtaatactggtctaaagaatttcttttaagcactaaccttttctggttttggtaccataataataagaagaaaagaatagctaacacttattttgcacttactatatgtcagtcagtgctcttagcatatctcttttgtttttgccatttaatcatcacagttctatgtggtaggtactctggtcattatcctaattaagccagtgagagtgttaagcatttacctaggaatacagttagtaagtgtctgaccaggaacacattatctgttctctagaaaaatttaaaagttaatagttacgtattgcctgatagtttgataaaagcatgtcaataactaggactcctttttattttcccaactgattgcatttccctaatggatgtaagtgtattcagttttaaaatatcttcctggatcgattttaataaggtttaattctctaggaaatattccattacatctatatttttatattaaatattattaatacataatttactattcaataatttaatatgaaaatgtagactatttttggtttttcttgattaatgttgttagaggtttgtgtaagttttttatcttttctaaaaaacaaactttattctatgctgaatctccctattgtggcttggttttctaaattcctttatttctgttattattacttctttctaccttcttaagatttactatttttctaacttcttcacttaatcattgctcagttaaatatttagctaataattttccaattgttttgtcctagtacagacatttaaggttaacatttttcctgtgagtatactttttgttgtagtctatcagttgtgcttctcttgtttttcagatctaaatagtttataaattgcaatctgatttctgctttaagctataaaatattcggaaaagcacattttggcattctttactaattttattgcaatgttttcagagaacatgttttgtgtgttaccaactcttagagactttctttgtggccaagtacatgaacaatttaaaaatatatcctatggatggacttcaggtgccagccaagatgaagtaagcctgctagaatctttctctttcactcattacaattaaaaattcaggacaaaatactaaaacacttacctgaggatgattccgaaacaaaataatagcaagaaggttgaggagcgacatcaaaactcaaaaaatgaccagtatgccaatagtgagtttcctaggatattttccttcaagatcatctggtcttggcttaaggatgggccaaatcagggaacaatgtgatgggaacagacagcaaaaactttgagaaaaccctggttttctgtcagagtactaagaaactgggaccctgagaggtggaaagtggaggttgaaggtgaaatcccaatgtgtttttctctccctctgccccaaggccagcttcattgaccagcttcagtgcatgtagaggcagcagcatgaatgtaagccctagaaatccatctttctggacagaggaaccaggaaaatgggcctctaggggcctctgtgtgtaaagactgtggaaggaattcccatttttattttcagtcttttctttcattacttcatcccccgggtatatccaataacacagaactgtgcaactgtgtggaaaacttagaagactcctggccagagggactgggaaaagaggaccctgagagacagactctgagagagaaaattatttaaaaagaaaaaaaaaaagagagagagagagagaagckgccccgcccggctcgcagcggcagcatggccgcagcgcgggggcagcagcagcaggcggctgcgcgcggatgtcgcagggtttcgcggcagcatgacggactacctgatcaggggcggcaccgactatgtgcccgataactggctccccgcgcagcagctctttgccagcgccgactgcctcacctacgacgacttcctgattctcccaggattcacagacttcatagctgatgaggcggacctgacctcagccctgacccggaagatcacgctgaagactccgctcatttcctcccccacggacactgtgacaggccgacatagccattgcaatggctctgatgggaggtattggtttcattcaccacaactgcaccccagagttccaggccaaggaggtgcggaaggtcaagaagtttgaacagggcttcatcacggacccggtggtgctgaccccctcgcacactgtgggtgatgtgttggaggccaagatgcggcatggcttctctggcatccccatcactgagacgggcaccataggcagcaagctggtgggcatcgtcacctccagagacatcaactttcttgctgaggaggaccacaccaccctcctcagtgttggctccagcaggcctgatgttgaaagaggcaaatgagatcctgcagcatagcaagaaagggaagctgtctttcgtcaatgatccgatgagctggtggccatgatcacctgcaccgacctgaagaagaacagagactaccctctggcctccaaggattcccacaagcagctactgcgtggggcagctgtgggcacccctgaggatgacaaataccgcctggacttgctcacccaggygggggtagacgtcgtagtcttggacttgtcccaagggaactcggtgtatcagattgccacggtgcattacatcaaacagaagtacccccacctccaggtgattgggatgacagccgcccaggccaaaaacctgattgacgctgcggtggacgggctgcgcataggtatgggctgcggctccatstgcatcacccagraagtgatggcctgcggtgggccccagggcactgcattgtacaaggtggccgagtatgccctgtgctttggtgtgtccatcatagcmgatggcggcatmtagaccgtggggcacgtggttaaggccctggcccttggagcctccacagtgatgatgggctccctgctggccaccaccacgtaggaccccggcgagtatttcttctcagatggggtgcggctcaagaagtaccagggcatgggctcactggatgccatggagaagagcagcagcagccagaaatgatacgtcagcaaggggaataaggtgaagatcgcgcagggtgtcttgggctccatccaggacaaaggatccattcataagttcgtgtcctacctcatagcgggcatccagcctggctgycaggatattgggccgcagcctgtctgtccttcagtccatgatgtactcaggagaactgaattttgagaagcaaaccatgtcggcccagatcaagggtggcgtccatggcctgcactcttaggagaagcggctgtactgaggacagcagtggaggccaaggtggtggaaggggcataccgcagtgtccactttcaggcacagcctccctccataactgagtggtccacagacttgcactataggttccccagctcctttccagggagaaaggaggggaagttctgaggggtctgcagcctcttgctgggcatcgcctgcagaatcagaactgctccctgggccagagtgccctgggaaccccccaacacacacacaccagcccagccagccaggctctcaggccctgcgcatgcctcaggtctttcttgctgcagcctgctccagcccggcccccaccacagggacaagaggcccctcctggcttctcctgtagggcacctccctgcccccagcccccgaggaaatggtgctctcctggccctgcctctggcacttcctgggccactaacccctcagccatgtggcacttctgagctcttgacctaggccaacgggaggtctctgcccacttccccggccctgggctacccttgggtcctgctcctcaggccactcccctgtccctggccctgggaaggaggcttccctgatcatggccaccttcccgtcattcctgactcaccaccgtccccaggtatatcattcctgccctctcctcagctgcagttgaaggctcactttgcacagtttgggatcacaattgtataattgtgtattaaataatcggaataaatcaagcaggtctcaacacctccaaaagaaataataaaaataaaaaataaataaataaataagaagtgaagaagaaaattccctggtgtacccccaaactctgcctgaatggaacacatccaaagcagcatagcaaaagctttaagaattgtctgtgaatcagctccaaagtcttatactaatccctgactgtttcagataacaataaagactttaaaccctgaactgacattcgaactagcaccagtggaaggcaagatagaactcatggtctgaacccaactggatttattagtaaacaaaaaaacttcagaagattttaacaagatgcagactctcacaacacattactcaaaactttgaagatgcaatgcaaaattgctcaacatacaaataataaaaaaaaaaattggacctgttttccactgaaacaacaatcaacaaatgtcaaatctaagatgatccagatgttggaaaaaagactttattgtagctatgataaccatgctccatgaggcaaaggtgaacgctcttgaaattaatggaaataaagacgttcttaacagagcaatagaaactactggaaaaagaaaagggaaaaactggacatttaaaaagtaaaaaatacaacacaacacttgaaattttaaaatttcctagacaggttcaataaggaatagagatgacagaggaaaaagtcagtaaacttaaaaattgatcaataaaaattatctagtctaaataacagagagaaaagattgaaaatgaaaatggccagagcctctagggcctgtagataatataataacaagattcaaaaaatctagtagtggtgtcattggcatctatgaagtaaagggaaaaactgattggtgaagaaaaatatttgaagatatagtggatgaaaaacttcctccaagttcagtgaaaaatataaatttacagaaaaaattcaagaagttcagaaaaatagtttaaacccaaacaagacttaagggaaattataacaaagggaaacttgtaaccttaagaatgaggataaagcaaaagaaatgcttgggtatctgaataaatataatttaatgtttttctcctctcagtttataaaaatatatatgacttttgaaatcaaattttataacatttctagaaaggttccaatgtatgtaaatgtaatggacatgagagagcaagtagatagaaaatcagtaaggacacagaaggcatgaacaacactatcaaccaacttgacctaattgacatttgtagaacactcttgcccactagtagaagaatgcatattctcctctagtgcacatggaacattcaccaacatagaccataaaacacctcaacaaattcagaaaaaatcaaattatattttgtatatattatacattatattttccaaacacgagtaacagaaaaaaatctgtaaagcacctaaatatttgaaaattaaataaaccatgagtcaaacaagtagtagagtgggaacttgaaaaatattttgaaataaatgaaaacaaaaattaactatgtaaggaatgaaagacatgtactcccacagactccacagatattaaaagactaatagtaccaacaactctatgcccatgatttaaacagcttaaatgtgatagaccacttccttgaaaaatgtaaaataaccaaaactcactaaatagtaaattgtctatgtcttcatctagtagaaaattaaatattttatttaaaaacttccaaaaataaaaactctaatcccagatggtaaattttactaaatatttaacaaagaaataatactaatttcacataatttcttccagaaaaggaagctgaggctgaggggtatatatttcccaactcattttatgaaaccaagattaccttgataccaaaatcaacaaaaaatattacaagaaaagtaaactacaatgcactatttctcatgaacataaacaaaaaagatcctcaaaaatctgaatccagtaatatatttaaaagataatataaaattatcttttactttatttaaatgaaaattacaattacttatttattagaatgcctataaaagaaaacacacaaaaaaactgacaatgccaagtgctagcagagatgcaaaccaacagaaactctcatacatagctgaagagaatgcaaaatggcacagccactctagaaaacaatgccttataaagtcaaacatacacttagcatatagctcaataaccctacattttagcatttacctaagtgtgataaaaacccacattcacacaaatatggtaattttaaaacaaatgtgttagtttcatcagaaactggaaacaacacaaatgtccctcacttggggactagataaataaatgtgatgcattcatataatgaaatactatacagcaataagaaggaataaagtattgatgcatgcaagaaatgaatgaatcttaactctattattctaagagaaataaacctttttccaaagttaatatacagagtaattccatgtatattattttctagaaaaggcaaaagaaaattgcaagaactctacatgaaaaaagagcaaatttatggtacataaactttttaaataaatttttaaaatactttgtgggtgtttgaaaacaatttgcttcacctacttattgtttgtagtgttctatatatgcagcctgtcattttatgaaaattatgtcaaaatctcccactacaattgataatttgtccatttcaactttaatactattgattttcactttatgcattttttcaggatattatttgcttttaacatataggtattcaggattgctgtattttttaatgaattagaccatcacttttccttaaagtcctttttgtttcaaggcctattttgcctttcattaatattgcaaaatagttgttgggttcatctttgcccgcatatgttttcacatttcactattttcatcttttcattatgatcatgtgtaggtgtatttctcataaacggcatgtaactagatttaaaaaaaaaaaaaacaggtctcattctgtcacctggactggaatacagtggcataatcacgkctcactgcaacctccaccttctgggctcaagaaatgctcccacctcagcatcctgaatagctaggactacaggcatgcgccaccacacttggctaatttttatatctttttgtagagatgaggtctcactatattgcccaggctggtctcaaactcctgggttaagcagtcttcctgccttggccgccyaaactgctgagattacaggcatgggtcactgtacctggtcacaactggattttaaaaatttaatttgaaattacctatcttttaagaggtaaatttatcattagcatttatgtttttaatacctcattttgtattttattttatgtctcctggtttttatttacttgttttttcaactcccaagtgcttggaataccttttttaaatttacttattgctctttcctttattaaaactgaatcttttattagtttgtgtttgttttaaattctattgctcttctatagagtttatccttaaatatgttacatgcattcttgacctaacagagtgaaaatttaatcactatcactagctccctccagaaaatccgatttgagaaagctttaactccagtcattcatctctgattttttcatgcaagttgagctttaactctagtcatttatctctgatttttttcattcaagttgagctccatcttttttttaaagcgctcaaaattagtcatcaccattatttttattattgcttctgacattcgttgtttatttagattcatctacaggttaattcatttctttgcagagatgttaatccacactttaatcaatttctttaattttgcatcctattcattgttccctctccttctttttcaaagtgcataatttgatgtttcctttagattctgtgaataataatactaattactattttcaattctaaattttctgaatatttttaaattttatttctactctgttataacaaaatgttatttggtcctgggtaccagaaacggatgctgagcctcctagatgagagaaaagcactaagcatcccaagtctcaatacaatgatttttcagctcttcatgtcacctacccgtgaaaggtttgctgaaaggcaattctcctgcaaaaccagaactaccaccctcactcttaattcagtacaagatgaaagttagaaaaaggtgtatttttgtgggatgcacattcacagcgaaaagttttttctctcttcacacacccctccatgtggaagaaatgcaatattttcccttcctgcagacaggaataggcgaaagaaagaggatcactaaaacaacttgcagttatcgaaaccacttatttccctctaagtcaggtatgagtatttctcagctaaacttagcaaaactctttatttggccaggaaaacccaaggtagaaacaagaacaggaaaaattacagaatgtgagtttctcacaattttctaaagacatcagttgtctttttggtaaaccctcacgaagttgtgggccactaactatggcaagagctaaagagaaaaggaagaagttagaaccaggggttcagatttccacatcaaacaagggaaagacactcataggaccctgaagaaccaattaatgtgttccacaaagcagcatccatttatatggttgcaactctagaagctaataggctaatctcagtcagagacacaggattgggtatctccagactgcgatcagagacaattattaaaaataaaatgtgttttcctaatgagttgtctctcctcaataaaccaataaaacctaaataacattttgagatggtatacgattacaaattactatttttgcttttgctggcacctaggttaattccttgacttagggttgtgtctcacaaattaagtcaatctcacagtttcacaatggattaagttttcaatttattgaagataactttgaaataacagtactccatactacgtacttagactggtggcaaactttacctagtcctcctttcacaggtaaactaaattttacaggttctgtatttgttgaagccctacttccagtacccatttagatgctaaaatgcaaaacttcagtcattaaggtctatatattattttaaactccttaccaaatagaatcccaggacttcagcttctacttgtgacactgacttgaaaatttcttctcatctct

SEQ ID NO: 95073 - DNA, 90361 bp, Homo sapiens
  misc_feature (1)...(90361): n = A,T,C or G
agcagtattgtgtgtaggatttgagagcacaggcgctggggtagactgcctgggtttgtatcctgtttgtgctcttagtagccctagcacgaccttcagcaaattaatttttctaactcttagtttcttcctctgtgaaatgggactaataatgacaacctttgggttgttatggaaattaatggaggcaatacatgcaaagtgcttagcacagtcccagtacttagtagtgcttagtacctattagctgctattatttttcttgagagtgccatatacagtgcagcagtttgcttgtagattgtgtgacttgtcactctagtacagctttccatgtaggtaattgaggaattgaacagcagagttggaagggccctctgcaggtctggactgaccataataacaccagctaacacttagagtaccggctatgcgaggtactgtttcagtcacttttcacaaacaggcagaatatcccttatctgaaatccttggaaccagaagtgtttttggggtttggatttctctagattctggaatatttgcatatacataatgagatatcttggggataggacccaagtctagatgtgaaacgtattctcatttcatatacaccttatatacacatagcctgaagataattttgtttttcctttgaggaagcagaataaactgtatcctgcgcctgcrttttgactggcccatcacatgaggtcaggtgtggaattttctgctgtggtgtcatgttggtgctcaaaaagtttcagattttggagatttttggattagggatactcaacctgcattaaatcagtttatcctcaaacagctctaagagataagcacttctatcatcccattttactgataagtatgtggaagcacagagaggcagagtgacttacctaacagcacacagctcataaggggctgggctgggagttaactccaagcagtttggccccagctgtgctgcaatcattattgtttggctcagagagaagggccttcttctgaaggctactcacagcagatgagtaacctccaggctcttgagcccctggcttgccattctttctcccgaacctggcccagtgccatgctaggcggggggcatgtgttggaaacctggctgacacgtgtgagtccgggagcgattgggcaccttcggtcattctgctgtggttcgtcaggctgtggttcctcagtgtgagctggaggagggcggcaggatgtggcaggtgccctgaaagtgactgtcctcctggggcccaggcagcacttcctgctctgtcttcagggaccccagagctccagagagtagcagcttggtgtctccctctcctttccctggggattgaggtagggggtgctggcctccctgtgaccgtgagccgtcagctctctgcctttctgcctgggcccttctggaggacagggagaactctgtgtgctggttcaaggctggaacaagttccttcagccactgtgagcttcacgaagaggaagcgtgagtcaccagggcctttacaagctccaggtgaatggaaggggtgtgttgggggcgtgcttccatctctcttgggccccatggtctatgggagggggcctgggagggctggggcattccattattgttcgggtggtttttcctggaatttcttttgaagtggtcttcgtgacccagtggcactgagtcacggggtaaacagaattatcaggggctgggctcttggaaaggacacagacagtgcccgtgggccagtcccagagggtcaccaggctggcttcctcccagtggcttccttccacctctcccagggttttggctgcagcttccatgtgcatcccacctgtggactccagctctgggccagtgtgtagagcatgtgccctgggggcttgtgagaaatgcattctgaaaccccaccctcatctgctgaataagagtttacgttgcccaggtagttcctttgatagtaaagaattcttatatacgttggccaatgtcagtctaattggctaagtcctttttggaatgttcaatatcaatttcttggattaatagactctgatggtattggtacgttgaaagtttgtggttggtgtcattatctcgtgtgtgtgtgtgtgtgtgcggacaaaaaaaacactccaaggaggctgatcctacagtcccccttagccctgggcactctgcgaggtagagaatgtccctccacactgtttctccttccacagcagcccatcctaggtttcagggcaggttgggtggaggtgccttcaggagaacctggggaaattgtctcctcctggattgggccatggcagaagatgaggagcaccaaattaactccaaatttgatggcgaaaccccagagggagacgacgccgacacctgcccctccgccccatggaagcaaccggccttgaaaggacccccggggcctttgggggacagtggcttcttttgccttttcctgactgtcctgaccacacaggcctttaggacaacaataaccgcagagacaaagcatgaccgagacaatgtcgtctttgggccttttttcccccttaatgacgtccaaggctctgggaacattgtaaaaactgggtcctgtccaattttaaccactccccccaccagctcctaggagccctgccagctccctgggttgggggtgggagtgatgcccagagatgcacacaaagatgtcacgctgccctggttaggccccagaggccagtcaggactgcagggacagggaagaggaacagaacgtgtcgcttggcctgtggactcccccagccagggaggtaggtgggcggagagagggaagggcatctgccaagcttaattaacagtggaaacttgccacaggggaggagagagacgatttgaagaggaggggcagtttactggaagaaggggcactgctgatgccaagagtaagaaagaggggagcgttccagcagaggcatctggagcgcaggctgccagtgtcgtaagctgggatgggttgagcatagagatttctggaggtgagagtggggaaatttatttgtgcctgctttcctgagtagacgtcttccaaaaacaatccaccaacatgtcagtggctagccttccttgcccccataaagaaaaaatactatttaaaaaatggtagttgagtttagaaaataggcattgtgttgggttcttgttctttgaagatatcaatggattgcccgaattgcatttgactttatttcacagatattgaagcaacatgtaatgtgtatgatatagaaagagagatgggttaaaaaaacatgtgatgcaggccagacatggtggctcatgcctgtaatcctagcactttgggaggctgaggcctggtggatcccgaggtcaggagttcaagaccagcctggccaacatagcaaaaccctgtctctactaaaaatagaaaaaattaggcaggcatggtggtgggcacctgtaatcccagctactcaggaggctggggcaggagaatcgcttgaacccaggaggtggaggttgcagtgagccgagatcgcgccattgcactccagcccaggcgacagtgcaagactctgtctcaaaaaaaaaaaaaaaaaaaaaaaaaagtgtgatgcttattgtttttgttgagacaaaaatgcagagatattgaatgtacagcaaaactaatagtgtgggttggacttcagatatgggaggtggagcatgggttattcattattagcaggatcatagaattttaaggctgaactgggttttctggtttcatctcccttcagatgcacagacttccccatgacatccatgccactgagtgctgggcctccctcactgtctcaccccctcaccctcaggcttttcatacctggcagtgctgaccgtggccatccagacctgtttagagatgcagctttctccagcatccacccgctgctcctggtttggctgctggaggccatcaagaacaaatctaatcccttctgacagtcgtattgagagacaagacacctacccattccccagtcattctcttcagcccatgctcaacgccttcagattcttcagagtctctgaaaatgtgataatgaggctactggtcattgccggtcacgcctgtcctagtgcttgccattaccaaagttgctttttgcttgctttctcttttttctctcccccttcatctctttttctgatggacacgcctgctagctcgcctgcctgcagtctatctctctgccctcctgcatggtcctcacctccccagcaaagtctccctgctttcccctcaaggtctctcctgtcccccaggggcctcccacctacagtgcatctccctcccctgccccgctcccccatttacccccatttcttcatttctcctctttcccgtccaaagatgcgtgtagggtgtctagtcaagaattgcagtggaagagtgttttttgttttttttttctgagacaggatctcactttgttgcccaggctgaagtgcagtggcatgatcatggctcactgcagccttgacttccctgggcttaggtgatcctcccacctcagactcccaggtagctgggattacaggtgcgtgccaccacgcccagctaattttttgtattttttatagagatggagtttcactatgttgcccaggctggtctcaaactcctgagctgaagcaatctgcccacctcggcctcccaaagcactgggattataggtgtgagccaccgtgccctgctgggagctccttaaatgtggtcccccacatttcttgttgtggagcccaggatctcattagttcttggcagctttctgatgccagagccctaaggcttgttcaaagcccttattgcaaaaattccatctccagctcacccacttggcctggtacataccgctcttcattgtatagttcttttggctccaagaacaaaacactggattcgtccttgttttatctgacctgccatctctgtgtgttatgctttgtccactcccaatttagtctctgagtcagtttgccctcccttttaattttatgtcatccatagtcttgatgagcaaagtgtaccttctgtttccattaatcatggaaattgctgaaatgggatgggggatgggggatgggggatggggtagggaccttataagccatctggttgaactccttcattttgcagaccaggaaacagagttccagaaaacaaaagctacttgctcagcacgacccagctatgggcacctacgtagagctaggttcagaaactgggcttcccggtgctgggagggtaacatctggttttgaagatatttgaattcaaaccaaaccacagtggttgtgtgtccacaaccaggaattaacattaagtgtggacaaaaaaaagtgctaccctctggctttggtgatggtacaattgctcatcattttaggagtaacttttaataagggggcagatactaactaaattattaagaactgagcttgaatacagttagaacctaaagagcagaacagtcagagaaagaacagatagttcagttgttctttaatttctgctctgttaccctctgcatggaagccagaatcatattgctagagatgtggaggaaacccccacaccccatgtttacctggggcatgtcactcccttgctaagcctttccccagatgtcccaacaagaagccagctgactgactccaagttcccctctgcccgcctgcccagagcaggaggggccgataaagtgaggtgggaggcctggcagaaacrccgaagtccagatctgctgagcgcgcctcctctgcttggcctgtggatgtggatttctagtgcctggtgcatgtagctctcatggcctggcattgactgatgatcagctggcttggggtgaagacgagtgaccccttggggttagtaacatggtctcccctctttycccaggttctacctacagcgtcctgtccaccatgccctcagactcagaaagcagcagctccctcagcagtgtgggtgagtaccacygtctggggaggacaccgggtgggccaggggtctgggtgaaagccaaggcagctggggttcatgggagaggaagctggttctcccttgtcagattactcacaggatcatccttccgttgatttcatttacattttctcccrtcatcagaaacccagttctgatgttagaaggaggtggggaggtgagtgctgggaagcacatgttttgccattgtttactttgtcagggcacagggcttctaggggagcctgttgacccaccatccccaccccaaccccaaaggccttgtagtaactcagtgaccactgcccaggagactcaccccttttggagtttccttggggataggcattgccagtccatgctgaattgggtgtgtttctctgaatatgggtttcagaaagcccataaaatgaggccagcccttctctgaagtccagcaggaaggccgcagtggtttctcaggcttcccacacctctgtgacccattccctctgtttagcacctctagtggggtttctcatggcctgatctgaccatgatggatgcagacaccttcagtggtgagtcccggccatcttttgagcccgaaggactcacagaggtcatctactccaattattttcttttccctctgcagagagatggggaaattgacattctgggagggggagtcacatgcctgagattctagaactagtcaggacagctctttcatatgtcagctcacatcttgaacacctccagtgtgccagaggtgggcttgggccgtagtggcgaattaggcagatgtgggccccacactcctggatgttagggtcttttggtgggaaacagttaaataagtagctgcagtaagggaaggtagtgtgataagagggaagacagtgaccagccggcgagttccatcttagttttctagggctgctataacaaagtgccgcagaccaggtggcttacacagcagaaattgattgtctcacagttctggaggacagaagcccaagatcaaagtgtcagtgaggccacgcaggctgaaggcgctagggagagatctgtcccgggcctctctcctcgcttctggtggcttgctggtaatccttggtgctccttggtttgccgacatcacactgatctctgcctttgtgttcacatgatgttctccgtccatgtgtgtctgtctccaaatttccccttttaataaggacactggtcagattggcctaggagcctgccttacggcagcaagacctcatcttaaattgatcatctgtaaagactatttcaccatcagcaataactgctgtgggctgagcagtgtccctctcgggactccccttttagaatgcaaatgcgcctcggaaagataacgctttgacctttccaaataaggttcacattcacatttactggattgggactttagcatcttttggggggccacaactccacccataaaaacacagttcctcccataaccctcatccygtttagggctcagggcaggcccttctgggactgcaattcaaagctcccaacggtatcctattactttgttctgcctgcttttggtgcccggagacatatcaatggaatgatgggattgttggaatttggaatgtgggactcacccttcaggaagtgcatggagtggggcagtcaggatcagtagatggggaaggtgaggctttttaaggtggactgggtaagccctgagcatactcctctgacctgtctagtttttcacccttcaccaatatctgtctaacagatagcaatcagtaaactcattcccatcggcatttcaagggttaaatcgttacctttcctaggcacatgtgcattctaaaaggggattccagagaggggtatttgcctaacccatagcaattactgctgatggtggaattcccagcctgagtaggaagatatttcttgggcagctggaccccagcatattctggaagaagcgtcatggccgtgacccaccagttggttctgcactcacctgaagctgactcagtccttgcgatggagccgtcaacagtatctctgtgctcttcctgggcatcacaggcaggcagagtgcagtgctctgatgtgtttcttggagcaggatgggtctgtactgtctgtgtctggatatttaatgctgaaataactggttgcatcccttctgggcaaagcctcttgagttcacagggaaccgagttttgcttctcttgctcttctgcttgagattgccattgtcctttgggtgcaggcagcagggaacacccactcataccaccttaaccaatcaggaaatgtatgagctcccatatgaggctgtgctgaggtcagccrgtacatggggatgcagctctgccctcctctgtgtggtgtcttcacacagtctcatggcggggtgtctgtagcagcagctccagccatcacatccagacctgacagtgtccaggtctgcagtgtccagtatgggcgccactaaacacaggtggctacttaaatttaaatgaattaaaatgaaatttaaatttctagtttctcaggcaaatccaccacatttcaagtgctctgtagccatctgcggtgagtggcagaagaagaaggcggggttcttatgagcaaaggaacctgttccagagtccatcagtatggcctcctttcattgaccrcagttggctgcttgtttgtgccgaaaccagtggctcacaaagcctggtcgctggaccactggggcacttattagagatgcaggtttgagcctcctcccacccctgctgcatcagaaacgctgagggtttctacagcttaatagccctccagtttgagatgggctggcccaacctcatccctgagaagggaaccagaatgtctgtaccaggcttgtaccagtccctcggggtggagtgcctggtggggctggcyctggctgggagcactctagcacctgccagggagttcctgctggctcagccacacctgatgagaggcagaagtctttgcaagcacacaccgccctggcaggaggggccgctggtaaggtcacatggtgatcttaggaacctgagaaaaggcaagagcaagatccttataataaaaacatcacttccacttttccatttacatctccctaaatggaaacggctgggaaaacaatggcaggttgtattcagcatgagaagaaattggaggctgaagcctggggcgtgtagacagcgttctctcaggcggtctgtcgggtctcrgatctccagcctggccctactcacaactcgccacacctttgccaacagccttaaaggcagcaggtctttgtgccaaggcctcctcgggcagttttcatcagctaagcacacacagcttccccgaggccctcccccgcttcctgcrcctgttgttgtgacctgcccccgaccctacctggtggatctgcctggggactgcacactcgtttcaggcaatcartacttttttcctccccattcatcctgacctaatttctcagtagccttttatttctcatcttggaaaactggggaggttttaaggaggagaagagacattcttgggcagcacttataaagccagccttaaattccatgaagattgaaatagcagragatttcttattaaatggagaggtctccaggcttatcggcaggagaaattgctggagggcttctctcatatcccagggaagattccttgaaagtgcttcttctggttgacaggggaaggtggggtgagccatcagggaagtgggggctgccactgacgccctgtgacctctgatccttcattcctggcccagacttttgggtcaggggtaatcctttgcaaagccaatttatcagagatgggaatgcctcctccttgtggggcaggtgtttggtactcatagggatcacggtgaacacggccccaaatgttatcacactgccagggagacaggcactgtctggcacgactggctattctgttctgtgtagagcagaaagaaagaagtaactcaagggaagaagcagttagttctgatgaggggaatcacagaaagcttcctggaggaagtggcccttggactgggccttccaggaaaagtgctctggactagatgcagctgggaagtagttggccatggctgcttatggtggtttgggttctgaaaaccagaccctgagtcaagggttcgaaagcaagtctttgatctggctggagatctggggcctgggcttccagcattggaatctaacctcctttcactccaagctggggaaacgctgaactggagtcatgtactcattgactaagaggggtgtcccccttaggccttcattgtcaaggacatcagtgggggatttctttaaaggcagtggctgctggatagccagtaaaacaaaggagaaatatgcaaatgcaactttggtctggaacagaggttctcaaactctagcaggcatcggaatcacccggagggcttttaccacacggagtgctgcagggacttactcccagggtttctgattcagtgggtctgggtgggacctgaaattttgcctagcaggttctctagtgaagcttaggtgctttaagaagcactcgttcaccccaggcagggcctgggtctttcctggacggctctgggtgtcctgagttgtaggtgaggatgacgtggtgctctgatgactgtggctctgggtgtcctgagttgtaggtgaggatgacgtggtgctctgatgactgtgctctgccactgctttgcctctcccgggcagccagggcctggaggtggccaggaagtttacctggacatctctctggctcctggaagcacaggcatacagggcctggaagcaaaggtgagacctgcccagctgtaagaccaaggatgcgcctccagggtcagtgggagcatgacagtgagggagcccaggacaaagggcggtggctgagaaatccacccagctgccagtycatttgctgagcctcggtggtggtgaccatagcagccagggcaactgaaggagctgaggattcctgtgatggggacactcccttctgccctccttcttacacccaggtcagagggaggctggccgccccaaggtcctcatggctggagactgagatgggttgtgttgggacggctctgagccccttccttctgtcctgcttccttctctcctcttccagcttcctcgtaaggcagggctgtgtcttcctgttgcctcctttacaaaatgggggtgaaaagagcagcgcagggctggctgctctttgtctccatccagagcctgctcctgatctggtgtcttcctgttttgggccattttagtccaaaccaaatcccttacctctgaaatctgatcctgaacaccaaaaggaaaaggacaatctgcctccttctccagtggttgccagacttgggtaaggaaagcctgaggtcacgggagagttgacagctttgcatttgagtccagaagaacaactgcacaaggttagaactgcattggaagcttttgttggcagctactttggaggcttttgttgacaacccagctttatgttagtttctgttttgcctgtttttaaaaagtttactgtaaataaccacagtgacagcagaggaggttggtcctcatctctttacctgtcaacatcactcttaggatgatggcttcattcagggcatcacagtttggttttcttaaaaaaataggctaggtgtggttgctcaaacctataatcccagcactttgggaggccaaggcagaaggattgcttgagcccaggagtttgagactagcctgggcaacatagtggggccctgtcgctacaataaataaaaataataataattagccaggcatggtagcacacccctgtagtcccagctgcttgggaggctgaggtgggaggattgcttgagcccaggaggtggaggttgyagtgagccttgattgtgtcactgcactctagcctgggtgacagagcaagaccctgtctcaaaaaagaaatttttttttgttaaggttatgttcattgagatataatttacatacagtaaaatgtattttttgtaagtatacagttcaagttttgacaaatagtcatgcaaccattgctacttttaagatgcaaaacactgccctctgtatcttaaaaattccctctgcacttttgcaatctgccctttccccaccttcagtccttggcagccactcatctcttttctgtccctgtagtgttgcccttcccagaatgtcatatgaatggttgtgtagtatgtagcttttagagtcaggcttcttttgattaacgcagggcattccagcttcccccacaccctgtgtgygtccgcagttgtattagtcattcatcccttttcattgctgagtaatactccatcataaggacataacacagttgtttattcattccctagctgctctaaacagctgtgtgctggtttttgtttgaacataaattctcatttctcctgggtaaaatacctaagaatgggattgctgggtggtatggcaattgcatgtttagctttataagaaactgtcaaactgttttctgaagtggctgcatgactttgtattctcatcagcagtgtttgagaattccagttttgagaatccagctgtatccttgccagcatttggtggcattgctttttattttagccattctgatgggcatatggtggtaaaggaacttcatggttgtcttcaaatgcttgcaggtctattgcatacaagaaatccagttgttccctgtggcccttaggggttagatcaagggtcagtggagggaatgtccagggacagattaactcagtagagggcataattttagggagagagataagatgggctctgctgggaagtagtgagctcctttgctgtagaatttggtcttggtggccatttgagggatcctgacaaccatttggatggtaggactgcatcattttcagaatatctgtcaacctctagatgcaagtaaaaagacaaaaacttcagttgaatggggattgagaggattttctgcaacccttgctgttcttttggaacttctgggcgtagcacatcttgagattggtcatgaggtcccctgtggccctccttggccctccccatcccccaattacaaaaggccggaggcatcggctgcactttctgctgggtctgagagcctgatgtgtgatggatcttgggtctggttgaccttactttctgtatgtgtcctgtatgctcaagcctttgggccaagagaagtggaacgagaatccttccctattaggaggcattgttgtggagtggttgaggtgttggctttggcgtcagagctgagtgtgcatgggaatcccattttcctagccatgtagtctttctgacgtgtttctcaaggagcaatcctagcacaaccccagtagggagctgtggagattaatgagttgaaggtagagtgtctttagcacagaacccagtgcttgggcagtgcttggcacatgtcgttgctactttatctgtgtggccagccacgcccaggtcctcatggctgtagactgagacgtctggagacagagatggggtgtgttgggatggctctgagcccctccttctgtcctgccgcctcctctcctctctccagcttctttgaaagccagggctgcatctttatgttgcctcgtttatacaatggggatgaaaattcaaaatttcttgtctccccaaaggcaggttactgggcctggtggtgcttttctgttgtgaaactggacatttgatgtttctctgctatttcttgaacttgactatagcatagaatagccattctgaaagtgtggcctgatgtccctgaggtcctttcagagggctcgtgaggtgagactgttttcataatgatactaggatgtcactggtcttttctgcttccatcctcacatgggtgtagagtctagttttctaaagrttccatcctgggtgtgtgacattacagagatgagactccagctgtctctgtgaagctggatgttaaacagcctgtgtaacaaaatgcaaagcaatgatgctgttcctgcygcattgctttgttttgtaatggaaagggtggttaatgtctcataaaaaatcttatgtcaatatataatggagttttgattttttaaaaaataagtaaatatttaaaaattcttcttggttttaatttctaatcttgtaaattttattagacataacatctgtgaacaagagctctttggagtgccagataagtacagaggtcctaagatccaaaaatgtgcaagttttgaggttaataccttgggttctaggatcatttagaggtccatattccatattccatagctctgtgacctggacacactatttaaccttggtaagattgtgtttcctgatgtgcaaaatgaggataacagtgatatttaccttatgaggatcgaaatgggataatgtatgaaaagcatttcaaaaactgccaggcatggccgggtgcagtgcctcacgcctgtaatcccagcactttgggaggccaaggtgagtgggtggatcacctgaagtcaggagtttgagaccagcctggccaacatggtgaaactccatctctactaaatacaaaaaattagccgggcatggtggcgcatgcctgtaatcccagctacttggtaggcwgaggcaggagaatcgcttgaacccaggaggtggaggttgcggtgagccgagatcgcaccactgcactccagcctgggcaacaagagtgaaactctgtctcaaaaaaacaaaaccaamcaaaaaaacccaaaacctgccaggcttgcattgtgtgctactggtggttgttatttgggaggcaccgaggcatgagggtgaagtgcatgtgtttagaatccagactgcctgggcacttgagtcaattacctaaccttgctgggcctcagtttatcacctgtgaaatggggacgatgttatcagtacacacttgtgaggttgttgtgaaggtgaaatcaatgcctggaacataacctccccctgggcttggttagaggttgagtagcaggcacgttcaaaggaagctccacttgttggagagtcaggtaggttatggtcagtcagatgactcagcaccatcacccacctgacccacaaaactgctgggggcagcagtgaagctcagggtcttttggtggaaaggtgtgggaagacttcgaagctgcagaggagacccctttggggagaggaaatgctgacccstggcctcaccgccaaagaatattttgaccccaaaggtgcggcctggagcagagaaatcctggctgtcatgrtgctggtggcttttaaacacagtctgtgttgcttaatgacagggacacattctgagaaatgygttgtcatttggtaatttagttgttgtgtaaacatgagtgtgcttacacaaacttagatggtatctaccccatacctaggctacacgatatggcctgttgctcctgagctgcaaacctgtrcagcatggtactgtactggctacggtagccagttgtaacacaatggtaagtatttgtgtgtctatacatagaaaagaaaagctgcagcaacagtacagaataaaagataaaaaatggtccacctgtacagggcacttacatgaatggagcttgcaggacctgaagttactctgggtaagtcagtgagtgagtggagagagaatgtgagggcctaaaacatgactgtacaccgctgtaggctttgtaaacactgtacacttaggctatattcgacttacagaaaatatttttccttcttcaatagtaaactgttgcttactgtaacttttttactttataaactttatatttttttaactttttgactgttttgtaataacacttagcttaaaacacaaacacrttgggccgggtgtggtggctcacgcctgtaatccgaccactttgggaggccaaggcaggcagatcccttgagctcagaagtttgagaccagcctgggcaacatagcgawaccccgtctctaacaaaaaatacaaaaaaattagctgggtgtggtggcacatgcctgtagtcccagctacttaggaggcygaggtgagaggatcgcttgagcccaggaggcagaggttatagtgagctgagactgcgccactgtactccagcctgggtgacaacaagaccctgtctcaaaaaaacacacacacacaaaaagaatacacacaaacacattgtacagctgaatattttctttctttatatccttattctataggctttttctattttaaaaatgtttaatttttttgtactttttttgttaaaaactaagacacaaatatattcatatattagcctagggctacagagggtcaggatcaacaagacgtcattaggtgacaggaatttttcatctccatggtaatcttttaatttattttttttagagagaagttcttgctttgtcacccaggctggaatacagtggtgtgatctcggctcactgcagccttgacgtcctgggctcaggcgatcctcccacctcagcctcccaagtagctgtgactctaggcacgtgccaccacacccagctaattttttggtattttttgctagagayggggtttcgccatgttgcccaggctggtctcaaactcctgagctcaagggatccgtctgccttggcctcccagagtgcttggattacaggcatgagccaccactcttggctaatttttgtattttttgtagagatgtgatttaatctttttttttwaatacatatttcttttgtttctaactctattataatcttatgggaccacatcctacatgtggtccaccatcattgactgaaacgtygttatgtggcacatgactgtcgtgcatttcagggggtgctggagtcaagtggttggggttccacaacctgaaaagactgaaaagcacagcactgggagttgaggatcctcctcccactgtggtctggcttgtcatgcctggccctgagctccctatcctccctggcccttctggaaggccccaagccactgcttttgtcttgggttgggggactcttggtttgcatgaacatttgaccaacaaggatcagtgggacaggggtggtcaggacagcacagagaatcagaagacctatcatgtcctatgccctttgtgcgttgtgggtccagtgcggaacagacactgtgtcccctgacacgagtcagcctgccagatcccatccacaaattggatggttgctgtgagctcctctgaccccaacaagggtctctaagggttgattgagatatcaggtagacatattgacagggttcaatataaaagcaccatggattagtctcttctcctgggatgaggtgctttcttcctagagatggatttggatcttatcagaggtggtggtggcagcggtggctgttgcctgctaggagcataaggtgtggggctccctgtaggacactcagtcctagggtggttgatgagggctggtgagggttaagtagcctggaggcatcaggaccaacttgaattgcgtcacactgacctcagctgggagccagcagccctcctcttagcctgcacgcctgggctggttgggcaggtctttcaggcgggtggacggcttgcaaaaagggagccgtgcactgtccagccctggtcgaggagggcggggacacggcccttgggccccagctgccctggtccttagtagcgtcattggatttcaggtgtgcctttctcctcgagccatgccttccactctcctcagggcacaggttggtctgtcctgctccatgtgccaggcttagtggtgggtaacagctgatatttccaaaccaggggaggatgcaaggatcacggccaaaacagtcgcatcctggaggtgtgaaagccaggttggggagagagtgcgcgtcttcagggtccttgctggggtggttactgggggttgttgagtgcttggatgctggagccagatgccctgcactcactttcagttctacctgctaccgtctgtggctcagtgttctcatctgtgaaaggggaatgctaagaggacccacttgttgggtcacgaatagctaacacaagccaacagctcaggacagcaccgggcgcctcgtgaatgccagatgaacacaagttcactttattattccccttccacaggcactaccgggaaggcgccgtccccaccacccctcctcactgaccrgcaagtgaatgagaaggtggagaacctctccattcagctgcggctgatgacccgggagagaaacgagctccgcaagcgcctggcstttgctacgcatggcacggcctttgacaagaggtagtaattgcgccgtctcccctgcccaggccccatggttgggattactaccccgatgctggtgctgtcacccccaaacacccctggctcctgggggtccaggctgcgctgcctgagtgtcccctttyccycacctcatgtccagaaatgcttcccaggggcaggacccacaggcttcttgtggggcaggtccccatcccacatgtggcraggcccctgatagtggtgtgcttgtgtgcaaagtcagctcgtgtgtgtgtgtgtgtgtgtgtgtgkccctaccactgtctcctagacctgcctaagttgagtgaagctttatgtggttggtaaacatattaattgttccctgtcacacatgtgttttatttgttttttgagacggggtcttgctctgttgcctgggctagaatgcagtggcacaatcatggttcaatgcagttttgacctccccggctcaagtgaacctcccacctcagccttccaagtagctgggactataggtgtgtgccaccatgcccaactaattttttttttttaatttttttgtagcagcagggtctttcttttttgcccaggctggtcttgggcttctaggctccagtgatcctcctgccttggcctcccagagtgctggaattacaggcgtgagccacagtgtctggccccacatgatgtgttttaaacagagcacattgtacctggtgtctttgttgctttgaagaaaatgtttgctgcttttgttgtgatttagaggtagataccagggaagggtggcccatagggtggggcagagagagtctttatctacctgcatgatctaagaggactttctgggaaggaggagggccagagagtggtttatcctttarctcccatgctggtagaggtctggaggggaggggggcttggtgtaaacacttcagtttcacctctttccttcaggagtaagggtctatgcctctgcactttgtgcctctgggattatgccagagctgcagagcctgatccctgagcttgtattcatgaggatatgcccctcagtcagttggcccgaaggcaggatgagtgaagacgtggatgtgctagcacatgagagttggcacactatggcccaygggcccactgcctgttttataaatgaagttttattggaacacagccatgctcattggttacaaagtgtctatgactgctttcctgctacaaaggtggagtcgagtggttgcaacagaaactatgtagtgtgcaaagcctaaagtatttactgtgtggccttttgcaaaaaaagtttgctgacctctgctctagaaaaagggtcctcaaacttgagcatgcaccagaatcatccacagagcttgttaatgcacagatcattgcctctctttccctcccttcagaacacctgactcaggagggctggggctggggctaggcctgagaatgtctatttgtgacaagttcccaggtgatactgtgctgcaggtctgggaaccccactctgagatcactgctcatggccagtgttcttaaccttggttgcacattggaataccctggggagtttttaaaaaatcctcacgtttgggttttatcctcagatatgctaatgtaattgacctgggcattggtattttaatgtgtacccaagattgagagtcattgttctaaagagaggagaaatttcttttctttaatattttacttttatttatttatttatttatttagtaattatttttgagacaggatcctctctgttgcccaggctggagtgcagtggtgtgatctcggctcactgcatcctcgacctcctgggctcaagtgatcctcccacgttagcctcctgagtagctgggactacaggcacatgccaccacaccaggctaatttttgtatttttttttgtggaggcggggtttcaccatgttgctcaggctggtctcaaacccctggcttcaagtgatccaccwgcctcagcctcccaaagtgctgggattacaggcacgagctgtcacgccgagcctacagagaagagacatttcatcacaggtttctggtggactcagacctgttgtacagactcctggaagctcctgcagaacaagttggcaccttcttagctctccaggcccatgcagggagctcaggcaaccacggctccctccatcctagggattctgattctgtgggtctgagtgaggccaggatatctgagtttaacaaacacccaggtgtgtgtggtgcatagaagaccagtactggggaaccactgggctggcctaatccaggacctggytcctctatccgtgtgaatcctggggcctgtgttcatggggccattcgctctctgggccaggccctaccacaggctgaatcctgactatgagaggctgaagatccagtgcgtgcgagccatgtcggacctgcagagcctgcagaaccagcacaccaacgccttgaagaggtgtgaggaggtggccaaggagactgacttctaccagtgagtgaggcctgcttggccagggcctccaacacccacagacagctgcctttgcccttcttttctctggacttagtagccaggggttctggttctagtcctgtccctgtgcaagagcaagcagtctgcctacagcaggtggatttgtgcctttgggcctcagttttcctaagtgtaaaacaaggctattaatccttcacatcttattgccagcttcagagacctggcaggcatgaaagtgattcagaacatgcagcagggctcaggcaggcctctgggtctctgtccaggggccctactgcagcttcttcctgtagggtaggcccaaggggtgtttccctttggtctcccagcatccctctgagggtctttgcctgcccacctgctgatatctgtccaggccccagtatttggaggcactaggtctgtaccagaggggcctgtctcccttccctggagatacatgtgcccyttttggtgtcaggtttgtaagtggtgatytggatgtttctggaattgggctgttagcaggttttggcttgcctctgagtgctacagacctacctgccattggctcctgtccgctgtatctacrggaagtgttgggacctgaggctggtgatgccctggggtggggcggggtgtgaggggctggctggggctcactgagcatgtaccgggtgtttcagcacactccacagccggctcctgagtgaccagactcggctgaaggatgacgtggacatgctgaggcgggagaatgggcagctgctgcgggagcgaaacctgctgcagcagtcatgggaggacatgaagcggctccacgaggaggaccagaaggagatcggtgacctccgtgcccagcagcagcaggtaggcccagcccctggagactggccatttctcccaagtagtcctcattccttttaatggagaatagtattgagaagtaaatgctgggccgggcacgttggctcacatctgtgatcccagcgctttggaagaccaaggtgagagattgcttgagatgagcctgggcaacatggcaagatcccatctctacaaaaaaaaaaaaaaattagctggacatggtggcacacctgtagtcctagctactcaggaggttgaggcaggaggatcattggagcccaggaatctgaggttatagtgagctatgatcatgccactgcaccccagcttgggcgaaggagtgagacgctgtctctgataaaaaaaacacagccaaccaattgctggatgtgcttgtagcttgggttggcactgtttcccggccctcttagtggaaagaagtagggagtagctaagtgtacacatacacacaggcacatatacatacatacatacacatatgtatatctgtatttctatatcagacaggtagattgaaagccatgagttcgcattgacattttcaattctaatccaagaccacaggttcattttggtttccacctcttttatttttgtaacttcctttaaaaacatcagtgacaaggctgggtgcggtggctcacgcctgtaatcccagcactttgggaggccgaggcaggcagatcacgaggtcaggagatcgagaccatcctaacatggcgaaaccccatctctactaaaaatacaaaaaattagccgggcgtggtggtgggcacctgtagtcccagctacttgggaggctgaggcaggagaatggcgtgaacccggcaggcagagcatgcggtgagccaagattgcgccactgcactccagcctgggtgacagagcaagactctgcctcaaacaaacaaacaaacaaacagtgacaaatgtgattcctgttattttatttatttattttttttgagacagagttcgctctgtcgcgcaggctggagtgcagtagtgtgattttggctcactgcaacctctgcgtcctgggttcaagtgattctcctgcctcagcctccttagtagctgggactacaggcacatgccaccatacccggctgatttttgtatttttagtagagagagggtttcaccatgttgtccaggatggtctcgatctcctgacctcatgatccacccaccttggcctcccaaagtgctgggattacaggtgtgagycatcacacccagccaattcctgttattcttaatttgtttacttggtcaatcccccatgtgtagctgcctcccatgccctctgcagtcccccatccygttcccatctcctcctgaccctttgtgggctcttccaccccatgccttctctctgtcaggcctggtctcctcatgccatgccaggacccactcctctttccatgccagctgtgatatcccctctggggcgacctgccctagtgtaggtccttgtcttgctctgctttgcctaatggctttaaggtttaattgtttagataaaaggagtattccatattccaatgaaactgtattccattgaaaaacttgcttctgttgaaaaagttgctgtttattttcctttctccgatattgattgaggttttatgtggagtaaccagggcaggctcagcaagagaccctaagatggatatacttggagctattagaagtattttttrtgtgccctctgattaggggaattggtcgtgtgaggtcaggcccagtggctggggcaaaagttggtatttagcccataggtcttgactgagccttggtaatggaaagccggcagcaggaagactgtcccttctcgcacctgctgcatggcacagagaagctgtgacaacatgcttcccaccctttatagattcaggaggtgggggtggtgctcttggagcatttctctaaggatgaaatgagagagtagaaagtgccgtgctagctctggtcagtactgcccacaacccattccccctgcagggacccttccttgtgcatgtcagtggagcttcytggagcaaacagatttaaagactgtaggttttcagtttctaaagaggcaaaaatatttttaacctcaaaagaaatcctktggaggaatcttgcgtgtgaagcaggtaaggatggcggtgctgtgtcraaacaaagctcccaggaagctgcccgaggggatggccctctaagggtttgagccccttctctgccctggggtgcgtggtaacttcccccacctgagggcaggcggcctctcccggcctttacctacaccctgctgtgtgctttgttttcttgctgttttgcctgccggcagtttgttcttcttggtctacgcttggctcaggtaaccttttgccttggggtttagtttggattctatacttccttgagagaatcatcatttcagaggtgtatgtggctccacctcggtccaagggaagccccacagccttgctagaaagcrcgaggttggcacatctcagtgtaggagaattggtctgtatggctgtcatgaagacactgcgtagaaggcactggcgccgcgtgcccgtgtgtatgaggcgctcagtcagtgttgtggtcgttaatgatattattctaatcctgtcaagtctgggtttaaatctgcctcatccaggatgtgtagaaattgggacctgcataygttgtkggtgggaataaatgatacagccactgtgaaaggcagcctagtgattcctcaaaaaactaaacagagctaacaggtgacctcccagcgacactcctaggtgtccaggagaactgaaaatatacgyccacacagaaacttgaggtgtgaatattcatagcagcccaaaaccggtaacaacccaaaggtctactgaccgatgaatggataaataaaatgtgatctatccatacaatggaatattattcagcataacaaggaatgcagtactgatccatgctatagtgtggatgaacttcaaaaacatgacagccaatgaaagaaaccagcaaaaagaccacaaactatgattccaggtacatgaaatgtccacaacagggaaatctatgtagacacaaagcagatttgtggctgtcttgggcttggggtttgggaagtgactgctgatgggtattggtttctttttggggtgataaaaatgttctggaattagatagtggtagtggctgcacaactttgtggattcataaccttgtgaatatattaaacactgaattgcatactttgtgtggtatgtaaattataactcagagaggaaaaaaaaagactcagaatttcaccttgtcataaatagagaaatccagkctgggtacagtggctcacacctgtaatcccagcactttggaaggagcaggaggatcccttgattccaggagtccaagatcagcctgggcaacatagactatctctacaagaaattgtttaattgaaaatattatttttttagaaggagcactctgccctcaagaagcgtaaagtttccttgtctcccgttctctgactttcttgagcacctgctcagctttacagacattcagactgaggtctccctcccacccctgtccccctctccctttcctgtctgcctcacaggggagggtcttcttcccccaccttgcagcccattccctgctctccttttcctaccgttgtggtccttggcagcaggggcgggggtggggatgcatcctggtcattggggtcccccaggtcagttcagctggaccagtgcctctcagcaaacrccacctccagaccccaccaggagaagaggcctggctgccacagggagcagggctgggagcatctcagagctgctgggcgaccagccccgcgtcctggcatcctgggcccccttgccttcatcaggcgtggagtggatgcctggctgtgggatgctcaggtggcagtaggccagcagcagaggaagcggggataaggggatggccacaggcttgctccccgctgggcccaagggcaaaggtcaacctctctggacaagggcagttttgttgccgggttcctcccacgccttgtaaacttgaagaggcccttgcagggtaaatggtgctgtttgacttgagtgtttgcttgagggatttgtggggcttccyggccctctgcatgatttatctcagaggaaatgaggcagccctaggggagggggcgccatggttgagagcagcacacaggtgttttgtccatatgtgtgttttgctggggagggcctctgcctggcatccccatctctgggtttgggcagtccgagtgcaccttcttggattcttctaggctgtgtcaagaatgcccagaagaccctgacaaggcttggttggggaatctaagtagagggtgtttttgcatcttttttctttactaaaatagtgtgtattctttagttaaaatagaaaaaaaatcttcaaccaatgtgggcagccacccacctmctcagatccagcctagctttgtggaaatgaccatcctctgtgtaaaccattgggatggatgtgtatccttgtagattttttttttaatgtcacatttaatacccatatagtttwattttttattccctgaaacctgctttaaaaaaaaatcctacaatatatcatgggtttccttacattttctgtgaatttgcacatacaaaaaggtccttgcttgttttgttgtctgtcaggtgttaatcgaattctgtgtggagcgtcttggtggtcaacatcttcccatgttacaaaccatgtttcagtggacacacatgtctttgtgttcttttgcacacatrttttgaagtttgagccttacaggtagaattcctgggaccagggcagtgcacatgttctcctaggtcctgctaatctatttgggaaacctctcaggccccgagagtcttctctctcctcctccttgccctttcccctgtctttaaaatatactttctcttgtaattcatgaaagttgattttcttgtcccaggtatcctgaatgaatgccctttgatgggcctggaggaaggaagagaggagaggggtttcctggttgctgaagggcatcccttacagagaagcccacagaggagtgttctgaccaatgtagggtacaggtaggagggttggtctcttcctggcctccctgcagggaacagcttagactgtggctgtctttgtgcctcccctgtgcaacttccacccatttctcctaagccccttgaactcacaggccaactgtcccgtgctcaggctggagggacatcatctctaaagactgctgcctgcctgagtggaraagttgactctcaggccaggctcagggctcacgcctgtaatcttagcactttgggaagccaaagtgggtgtatcacttgagtctaggagttcaagaccagcctgggcaacatagtgagacccccatctctacaaaaaataaaaaatcagccaggtgtggtggggcgtgtctgtggtcccagctacttgggaggcggaggcaggaggatcacttgagcctgggaggttgaggttgcagtgaactgtgatcactttaattttagaattctgggccaaatttaaatattctctcttcattagcttttgctgggaagctaaacatttgactgtagttaggtgtgtgtgtgtgtgtgcgcactcgtgtgtgcatgtgcatgtggaaatacctaccaagaacataatcctytgatggcgagagggaaaaattctagaccaatagatttagttttttggattctccggagttaaccatgacctggttccccagctttgttcagaggctgttggttacatagtacaggcctggcactgagtcctgtttgtagagaaagggtgagaagtgtttggggcctgcgagcctctttgagtatctggatgctgccctgtgggaacaggttattctgtttgactccaaggctagagtgagaaccagaggttaggagttgcagggaggcggagtagctccyggtgagcacgaccctatcccaaggagctttcacttgtggagcaggccgagggtggccgtcatcgtggtggaagcaagcagtacggggcctgatctctctctctcggtcttctgacccgaggatcctaccatgttatgaaggctggggggagcagctgaaaggacctcgaggtctgtgacccaccctgtcgcactgggaattcgtggcccactctcacggcccttgctggcagcctgattcacacggccctgaatcatccctggattgtcacacaggcccggatccaggcccctcaaggttagccattcaggggactgcaaagaggccaaaccatggtatagactcctgattctgccgagcacttgtggaggtgggctctgcgggctaccacccagaaccgggctttgtgtcatttcaaggctgcctttggaatgagtttgtttctgagctgggaaggcgggaagccgctgcaggagagcgttggctcgtctccccgcggctgccaccttgtggggaactcaggcaatgacagcctcctttgttccccagcaaagcagactcatttggagccaatggggttctcacttggcttaggggatgtttagacagtaaaacatttgaggtaatttttttttttgagacagaatattkctctgtcgccaaggctggggtgcagtggcacagtcttggctcactgcaacctacgcctcctgggttcaagtaattctcctgcctcagcctccggagtagcagggattccaggtgcctgccaccacacccggctaatttttgtatttttagtagagacagggtttcaccatgttagccaggctggtctggaacttccaatcttgtgatctgctcacctcggcctcccaaagtgctgggattacaggcgtgagccactgcgcccggcctgaagtaatttttaattggcatttttgaggtattgctcaccaatcagggcaatccagtttagatgctggacctttccagatgtgggtagaaggcgttggttgaccagatgtcaggactgtccttcactgacccagtatagtcatggtgagcccattcttcgtcttttttttgagacgaagtctcgcgcttgtcacccaggctggagtgccatggcgtgatctcggctcactgccacctccgcatcctgggttcaagcaattctcctgcctcagcctcccgagtagctgggattacaggtgcccgccaccacgcccagctaatttttgtatgtttagtagagacaaggtttcaccatgttggtcaggctggtctcaaactcctgacctcaggtgatccgcctacctyggcttcccaaagtgctgggattacaggcatgtgccactgtgcctggccagggctttttttttttttttttttttttaaagaaagattttagatgtagagtgggcactgtcagtgaggttctgtttctcagtgtgcattcctgttttgcaacagtgatgccattttacaaaacagtgaagattttgactgcctgagatacctgtgtactgctttttaaaataagttctgtatttttggtgtactagtaagatttcccttgaaagaaaatgttctgctttaaaaataaataaaggaaaaagaatgagcctgaaatgaaccaatcctccctccctctctccctccctcctttccctytctttctctctctttctctttctcctccccttccttccttccttcccttcttccctccttccctccatttctccctcttccttgacttcctctttaagagtctacagtcctagaatctaatgcttaggtcttagaggaagaccttactttcttgttgctatgattctgacttttaaattaagccctcttttgctttttgtgtttttcgtgtttattgagagctgaccctaattccaaagggagtgttccatcgtcccagcttctggttctctaggctgcaaacgcttgataaaccaggctgccactgaatgagccaggkgattcctcggctgttggagctggaagggccagacaagctttcctggtctagcctgggcatttgaggaatccggaagctgaaacccagagaggtggagtgactcaccccagggctcagatcccatgaggtgcttagccraagccagcagcccccctggcaacctcttaactcatcttcttggtttgtttttttctctataacagcaccccaaatgaactttagtgcctgtcatttagagtagaatgctgtctagcttaaaaccctccacagcttcctgtctcactcaggagacagtcttcactgtgaggcctgcggccatggccacccccatgcccacacccacttctccaggtcccctttgaacccacctccccctgtgcattgggctcttgctactccgccttgcccctctctgtctctagaacacgcctgcaggccctgcctctgggcctttgaccctgcccccctctctgcccagtgtgctctcgctgctcttcttcatttgcctctgaagtcrccttcttcaagaagcctcttcagccttagcctccctcacagacctccactctgctgctcagatggctctctccagcccattattctgttttattttttattttcttgatagttcttaccttgctctgaagttactttatttggcctatctgtgtgtccacaccctccaaattaggataaaaggcccacagggcacagcgtctttctgtcctgtctggcatcaccagcccctagaccagtgctagacatattaggtacttgcatgggatgcggggggaccctacaccatggagggtcaccctagggcttttgagagtctttaggtccgatttacataacctgattctgggctatgtcactttctgggaggactcaaaagattcagtatgtaattatactcaatggctgacatttattacaacaaaagtacacagagcaaagtcggcaaagggggaaaggcgcgtgaggcaaagtccaggggaaactgggcctgagtttccaagaatcctctcctggtggagtttcaccggaggcacttaattcctccagcatggaatcacaacaacacacaagaagtgctggcctccacggaggcccattagagactcagtgctcaagtgtcttattgggggctggtcatgtaggaacttctgcctgccatgtacccagattctggactcccagtagaaagcaggtgttcagcataagccactttatttgtacaggctcagtaccagagctgcttatatcaccrgaagaaaagttttacatcagcctagagaactgtttactgttcgggttcctagacgccattcggtagggtcaaccttgcaagcaggcctttctaaggatatagaagtctcaggtcagctgtgttaactgttctgcacaatacttagtaaatagttgtgactgagtgaatctaaatgaatcagcccagtgtgactgcagggcctggagaattggacctcaagactctcaaaagctttagggtaaccccctccccccaaccgccttgtcatcagtctcaccctcagatagacaaaagtgagagtgggaggtctcctccgccacctcccacagacccttggtaagtgaaactgtctggtctccaggtgttgaagcacaacgggtcatccgagattctcaacaaactrtatgacacggccatggacaagttggaggtggtcaagaaggactatgaygcccttcggaagaggtacagtgagaaagtcgccatccacaatgcagacctgagccgcctggagcagctgggggaggagaaccagcggttgctgaagcagacagagatgctgacccagcagagggacacggccatccagctgcagcaccagtgcgccctytccctgaggaggtagggctagggccatcgggggccgggggcaaatgggtcctataaggttcccagccaccaccaggggatgagaacagcatgagttattgtgctttttcaatcaaaaaatgcttctgaccaggaaacatttttttttgacactgaatgtgtcttgggaatcgtggctccctcttcccatctgaacatccctgtttaccttcgggttcacggacaccattcagtggttagccttgcaagcgggcctttctgagcgtgtagaaatctcgggtctgctgtgttaactgctctgcacaatacttaataaatactggtgtgttctgagcatcctgtttctttggtcactgtcatgtgcctctcccctctgtggcagtcacccacctagcaaataggaaagttaattatctggggcatgtgtcttctgtcatctttagagatgtgatatatgccctcaaacagtgttttgtagaggatgtgcctgtgaatcaccagttctctggggcatgtagcagtttcacatgaaaagtgctctttggggataaataggtttgagcattgccaggttgaacccagacagatgtctctgctgcaggacttctcagagccttcagcgtggtgttgtgcagtagacagactctccaagagggggccaagatgcagagtttcccaaacataagtcatcagataatatacttttttgggggtaatggagctccatgcagaaccggtgtctatggagcacactgagaattgctggtctggagccatgggctctgatttgcaggctgcctgtgtggaagatgycccccggcctggaaggacagagctgtgctcttcgagcgaacttgatgaccttgtcacagggctgtactgttcgtatctgtgaaatgaggcggtttgactaaatgatcgttaaggcctctttatgctgttatcctggcattgttttgtttttattattttaaaaaattaatgtggcttgactgtgggagaaatatgctgttgtttctagtggagtggagggcatgaagtcctcagttcaactcctggcatttgtaaagggctgagaaaaattccaggtccgggggcactggtactccatgacttttctctcctgggggtggagagagtgacttcacttgaaacttcacgcttgactgtccagcacagtagagctggcgggaggcagcagcgcagccggccactgaccgggcagggcccccgcccttcccacatctcgccacctctcttgccaggtttgaggcgatccaccatgagctgaacaaggccacggcgcagaacaaggacctgcagtgggagatggagctgctgcagtcagagctgaccgagctgagaaccacgcaggtgaagacagcaaaggagtcggagaaatacagggaggagcgggacgctgtgtacagcgagtacaagctcatcatgagtgagcgtgaccaggtcatctctgagctggacaagctgcagaccgaagtggagctggccgagtccaagctcaagagcagcacatctgagaagaaggcggccaatgaggagatggaggcgctgcggcaggtaggtgggtgggccggtggctggctttcagcctctcctacagcatcccgggaagaggggctgcagagtgcgtggtgtycggattagaagcctcctgagttggagtaaatggcttctcactggaggcctaagtgcaagctgggttatcagacactgcctgagctcatgcttaatgcccagctctagtctggattacaggggacaaggcgggagggagacccagacacagtcatggctgcccggagcttacacaccaacactcacacccaaacccattgctacgtaattgcagatcagtcccatgctgaagtcagtgatatctcaaggacttgcttattatgaagcaagataccaaggccaagttcccaaagccatagatacgttaggcctcttgtgtctggaagagcaccctcaggggccctttttcaccagcagtgtgcatctcacgagtctgctcttgaaaaagtatttcaggctcctgctgggaagatgtgctagtaggctgagcccaacattcttctcctaaagccttgctctctgggggccacacctccagggttggggggctgggatgtttggtagcactagattgggccacctagctcaactcctgggtggccaatgtggattttctgtctccttcctacctgtcaacctctcctcatcgcggagctccttgccctaggtctagctgagccctgcgggggcttggatgggcccatggagattcccttcagtctgtgttgtgtgtggctctgattagagcttctagacttgatcacagcagatttttttcctatcagaatagttctcagatattcacatccctctattctgcctttctgtgcaggtcagttagaatgcagctttcaaaggtggtttatgagaagcaaaaagcaaggcgtttaaaggtcaggcagattggcagggctggtatgcattggatcattactaccaggtcctgctgtaccaagtgtgaggcaggtgatgcccagggggtgaccagcatgtctttcaaccgacagcaactcctcgtcaggcctgggcagtggtaggggatgtggggaatgcatgagacacaggccccttgctgggagatggccctcctcagtcatgtggtctcgaacctctctaggcctccgtttctttctttctttttttttatgagactgagtctcgtgttgcccagcctgaagtgcagtggcgcaatctcggctcactgcaacctctacctcctgggttcaagcaattctcgtgcctcagcctcccaagtagctgggattacaggcatgtgccaccacgcccggctaattttttgtatttttactagagacgtggctttgccatgttggccaggctggtctcgaactcctggactcaagcgatccttccgcctcggcctcccaaagtactgggattacaagtataattcaccgcctggtgagccactgtgcctggcctctgggcctcagtttctatttttaatttattttttatttttttattgagacagcctctctgttccccaggctggagtgcagtggcacaatcatagctcactgtaatctcgacctcttgggctcaagtgatgctcccacctcagaccccccaagtagctgggactataggcgagcaccagctcacccagctaattcttaatttttttgtagtgatgcggtctcactatgttgcccaggctggtcttaaactcctgggctcaagcgatcctcctgcctcagcctcccaaagtgctaggattacaggcgtgagcccctgcacccagccagcctyagtttcttcatttgcacaatggaatggtggtcatgatgaacaaatgattcaatatagaaaatacatcattgtgcctgcacaaagcaacagtgagttgagatgggcattcattattatgcccgtctgaatcttactcctctgttaggattagggtgaacctcattaaactgtttctgtgggtaaaaatgggccagccaagtaatgggaatttcatacaaggaaccaccaagacttctccagacccttgaggcaaaagccagtgtgaagagaaatatttactgcaatgaaatttttgaaaagcytattagaataaatttttaataagtaaagataatgcattagaatttggtaatcatcctagaaaaaccgtgaactcatgttcacatcctggtatctgagcacataattttttggggaaaatgtcaatatcaaataaggaaaacaaaatgatgaagaaggaaacttggaaaatgaccgagtcagtaactgctctgaaatgtcacagaatgtcagacacacgcctggggaataacagcgagcccgtgtggatggagttttgagattttcttttttctttctttctttttttgagatgtggtttccctcttttgcccaggctggagtgaagtggcacgatctcggctcactacaacctccacctgccgggttccagcgatcctcttgcctcagcctcctgagtagctgggattatagacacttgccagtacgcccagctaatttttgtatttttagtagagacggggtttcgctctgttggccaggctagtctcgaattcctgacctcaggtgatccacccaccttggcctcccaaagtgctaggattacaggcctgaaccactgcgcctggccaagttttgagatctttgaagttaatcgtgaagactgtttgtagaaatatagaaagcacagagatgcacaaagaacacctgagttccctgtggtgctggcgtccagcaatgagacctccaggcctgacgtccttgcggcaaccaccgcattcccagcactcaggcgagccattcagcctggagcccgcctccatcctccacagggggtgttgactgggcatcaagtgcacctgtcagctgaggcagggatcttttccaggccctgttccgagtcagcaggcaggagagagcccccgcggctgccccatcagctctgagagctgaaatcctcagctccttctcaagttggtctggcttcatggataagagagcactctccaccggcaagagcagrccaggaggggtgggcagtgaggcaccctggggattggccccgccaccccactggctgctgcctgtcaggggtcagctgtggggggccttctggcaggtctagctccctcaccgcagagccatcttcatcttgctcagcccgagggctgggcttcagtttctggcatcgtgcttgcacgcttctgtcttctatctgcacgtcttgctccattttcccctttccttctctatgccctctctcccttctgtgttctgagtgggctgaggcaaagagggagcaaagaggtagcatggggaggccgggggcctgtcaggatctttgccaggttggctgtgcccttgcctccctcgccttcttcttcccagctcccaggggagagatatcctcgggagctcccctaaggccgccctcctgcctcaggccagtagctgaccttgtccggggaagtctcattgctcccaggaggagggaggaactgcctggggagttgaggtcggcaccactggaagctgtaggccactgctgtctgttgcagaaatctcccaggttccaacgcactttcctagacgggccctgctcaccgagttccgtctgtagaagggcagccccccatgctcctgccgtctgctgccctgaatgcagttacacatgcagctacaggtcctgcttgaggagctgagctcagctgtggtggayagactggacagtgccaggggacaaggcaaggcagcagtggcctttccagaacttagaggcagagggctgttgtagcaagagaagcttcccaggaagcagagggaggtgccctcacccgagagccatctgctcaggggcaccactccacactcgggccccatcctcccctgggactctcgagtgggctctggccctctggggctgggttgcagcccataggcctttctcactggcctcatgcctgggtctggcaagtgtcttgtgaagactagcccatctcttcccacgcctttgttcacccagcacaggaagaaagagactgcaggtggcgcttttagagcagactcagactgacatctgatgccgaggcagcctggggtagaggagccagtactgatcagctctgcaggatgggggagccctggcgagtcacttctagatcctgcggttcctcaccagtgtaatcagaatcagtcagtccgtcacttgggtcctctgggcttccaaattttaccatttgtttaaggtacctcatttccctctcccctctcactaaaactaagtatagtacttcttgtattccttataaggaagcagtattttggggatgaattcattttggataccagcaatggtgtggggcccagggaaaggaagggagctgtgggctgggggagctgcccacctcctgcgctgcctgtcgtcctgtctgcacctggggcctccctcctagatgctcatctagagcaccatggagaaacctttcagggaatccacgtggtaacgtgtcagctctaaaactatccataaatatattgtaaaacagcaaatataatgtaaatttttcaaagtattgtttatcataaattcttgactaaattaatacactttttttttttttttttttttttttttgagaccgagtctccctctgttgtccaggctggagtgcagtggcgccatctgggctcactgagacctcagtctcccaagttcaagcaattctcctgcctcagtctcccatgtagctgggaccacaggcacatgccaccawgtctggctaatttttgtagttttagtagagatggggttttaccatgttggtcaggctggtctcaaactcctgatctcatgtgatctgcctgccttggcctcccaaagtgctgggattacaggtgtgagccactgtaccctgcccccaaataattctttttaaaatgaaaatttaagaaggatttttttttttgaaaatagcaaactaaacaaacacagcataccatgtaaagctgaaaaaaaaatcaaaactgaaatgatttgaatgacccccagaaaccgtgaggtctgaggaaagcctgccactgcactgtcaccctcgagttttgatggtcctttttgtgcaaattatttttcagctcctctgcctctgttttcagagatgaggggaattatcaactgactccaggtgttttcttgtcaacttcattctcttctcttgttttctacgtctgagatctttctgaacacatttttgtagaggctgctgtctcctgctgtctggagaatgatctttagagggaacggaagctttcttcctgtgcgtgtgtgtcttcctgtgtcctagcacttgggggtggagagtctcggggcggggacaccagtgtcatcagcgcctctgctgtcgtgcttctcttttgcatgtttggaaagcctcaagcgggaggaggagttattcttgcagtaaacacttgctttgtcatccgtcatttccctgtgttgtctaaggattatagaggtgtggagggggttttcatatgagtgctactaagagtttgacttgaaattttagtggagcatataactctctagggatgtgtcaagatgcaaatgctttggatttcagctttttaaatgaactgagatacacagcacttcaccagcaggaatactggtgtatttttgtctttaaaaataactcagtatgccagattataggatcacagacatggcgggggctagggggtgctggttaataggaccgtggctgtggggtgcagtcactgggggtatggggtgtgctgcgatgggctccgtgtttccctccatccagctccctagagcctcagccttggcccccgcactggtgggaggcgctcctggtccatgaggctcagcaacctctccctcttcctgccccttgctcccaccagatcaaagacacggtgacaatggatgctgggagagccaacaaggaggttgaaatccttcgaaagcagtgcaaggctctgtgccaggagctgaaggaagccctccaggaggcggatgtggccaagtgccggcgggactgggccttccaggagcgagacaagattgtagcagagcgtgacagcatccggtatgggrtgacctcaagctggyrtgggcttgcgtctccccaggatgaggggacctgctagggtctgttgggagggtcrgaatcatttactgtatgtccaggtaaagtgggagggacctgggctcctcctttctcacccctagttgatgccctagccttgcctcttagttttagaattttccattgtttctccctcccatctcactcagccctaggtgtcccaagtgtgtactatgtccacgtgagaccgctgtgaaggggcacgaggccgacctcttttatttgagggtttctgatgagaagagcacatccgaagtgtgtcctttcagcagtattcaccgggcgcctactgtgtgccagggtcttagatctctggagcaaggagaccttgggagaggcttggtcaggcacggcagtgagggaggaagatgtgtaactgagctctagggctgtggggggcatgcagggctccctggggtgtggggaggtctccccagagagtgtggcattcgcactagaactggaagcatgagtggggtttttccaggtggaaaagggggaagggcattgcagatggagggcacctgtggagtgtgctcagggcagggacgtgggcaagtcgtggggagggcaggctggcgagattcccaggggcaggtgtagaggccttgaaagggaagccaagcagtgtgggcttgatccttggctggggaggaaccaggagaggctatggtggtggtgatgtttggggtggggagagataatgtcttgctatttgggaggtgtccaaaagatttcttgtggtttgtcaggggagagaccaatgtctctaggggctggtcaggagatgaggatggctaggtggtgaggccctgctaatggagagcacagttaggtgcccagtgcaaggggagggaggcccaggggctgcttcctgtctgcttctgctcagaccccttccacgggtgtctccagggggcagtcctcagccrggctctgactgaggctgggggagattcgaggctgtggagaggtaggaaccagtcctctgggtatgtccatttctggaggtggcacagagcccaggcccctccacagccaggtaatctgtttccacctccttggggtcctctttcatagagtcttgccaagcttgtactttgcacctgcacagagctaatagagacagagatgcatgaggactggctggtatccgaaggggctcccttcctagttgcagggtacagggacagctctagaaagctctgcctgtgggtagatatgagacatgtggtagtgctggagcacaggcctgccaggcaggtggggggtgcttcatgcagaggagagccaccccctggctccccaagttggcattagaacagtgagtgtgtgcagagggtggtccttaaccccaggcacattgagggtgaaacagggcattgggaacctgacacttgttgccgggtgactgtgggggtgtctcttccctgcccaggtcctccacattccctctgtcatgcactggggctggcctaggtggtcttacccctagattcccaagtgttcctgtgcatctggggatgggataggtgccggcaggtatttggagtgaggtggccagaccatcygctgcagaccaggaacccccttccccatgcctcttgagatgaccttgtcctctgctccttccaccaggacactgtgtgacaacctgaggcgggagcgggaccgtgcggtgagcgagctggctgaggccctgcgcagcctggatgacacccgcaagcagaagaatgatgtcagccgcgagctgaaggagctcaagtaggctcgggtgggcacccgctggagtgggcatgcatctgggagcctggggcccctctcccttctgggcaaggcaatgctgagtgcattggccagggcctcatccttctgcgtcgagctggctgtttgtcccttcacttcactctgccttactctgtcagtgtgtagaatgggttcgaatgtcatctccatgtagggttaattagaaattcttaggccaaaaattcttagacacagggcaggcaccatgtgccaaggcactaggaagggaggaccctgttcccaagcagtccatctggggcaggcatgcatgtgttatccattcattcattcccctactcactcactcactcactcactcgcagagattttttaagtacctgctctgtatgggccagcctccattagaggcactggagaaatggcactgacaagcataccaagtccctttcctcatgggctcacagtgcgcaggaagagacacagaccaaggtcaggtccatctaagagacaagtacgtaaatgagtaagatgacgacagattgtgatttagagttttaaaggcaattgcaacccccatccagcagtctgttctgcttgtgttatttggacgyccatttggaagaccatttggggtgtcagacatcctcccctcgattacagcagcctcccagggtgtcatttaaacactcagtggcctttagtagtgcattgaaatacaaagatcagggtttaagcatagaaattggcagagcccaataggccgtggtctaaaacccaaatctagtaggaaagcagtggctctccatccattgtgcgacatttccctagctgttagtgtggtgagggggcagtgagaagctcgtgtgtgagtgcaagtgtgcaagccttgcacactcaagtgctgcccgtcagaagggagtgacagcttctcttctttcccattcagtaaaattcctaatgagacaaagagctccatttattctataaaaacccagactctctggagcttgggtgctctcaggaatattataggggttaagaggcaaggcaagactcttcacaggaaccatcttgggtctagcaatgtgatggaatcaaggggttctcttcgaagggaaagcctagaatctctggccgtgaacatgggacattttgcctcttgtttgggccagagttgcctgaagcttgtgcattcagcttgtgtgttcattcagcatgtttgcatttgtgcctcctgtctgctaagttctctaactggcaggatgctggtgagggggtctgtgttgctgcctgggaagcctcaggcactccctggtaatgccagatgagacaggtatagtgagcawtgaatgctgagctcagctgcactggcctggggaggggctggggcagtgttggaaggcattggagctctgccctggaggctgagtggcattctagagctggctggtgagagcacagcctaggcaaaggtgcggccctggggcctgtctgctggagcaggaaacacaagtaggtcaggagcccagtgggcagtgttcatgagctggcaaggcagcctgggcccagatttcaggaagggtgtcacaggcaagtcacctgaggatataacgaggcttctgagtctctctttcacatcttcattactaggtctttctctgagctaatatttataattttgatgaagtcaaatctatcaaatttttttttttgagatgcccaggctagagtgcagtggtatagtctttgctyactgcaacctctgcttcctgggttcaggtgattcttgtacctcagcctcctgagtagctgggattacaggtgcatgttaccacacctggctaatttttgtatttttggtagagacggggttttaccatgttggccaggctggtcttgaacccctgacctcaagtgatccacttacctctgcctcctgaagtgctgggattacaggcgtgagcctccgcatccggccatcagtgaacattttttaaaattgtaacaatggcattaaaggaaatgttaagaactacatcttcatcctaatataactatttaagtggtatttctgttgctgcttctgtcagtttgcatttcaatttgtgatatagttggcgttaacttttatccgaggttaagtggtttaggttgagatacatttctttggccatggatgtgcagtcgctccagcatcattagttggaggctgtccttcctctgttaacttatgcacctttggtgacttggggcattcctaggttccttattctgttctacagacctgtgtgtctgtctccctgacagcagcacacagtcttgattgctgtagctgtatactaagtcttaaattgggtagagagtttcctyccactttagtcattttcaaaatagttttagtgattctgatgcctttttgtatacattttagaatagccgtctatatctacaaaaatcttgttggcattttgattttattttttaaattaaattttattttttttttgagatggagtttcactctgtcgccaggctggagtgcagcggtgtgacctccactccctgcaacctctgcctccctgattcaagtaattctcctgcctcctgagtagccgaggttacaggcacatgccaccacgcccggctaatttttgtatttttagtagagacgaggtttcaccatgtcggtcaggctggtctcaaactcctgacttctggtgatctgcctgtctcggcctcccaaagtgctgggattacaggcatgaaccactgtgcccagctggcattttgattttaattgtgttaaacctctagataaatttggggagaatttgtcttttttaaaaaaccactgtgaaaactcacagatatcccagcagccttgacctgactctgagttattgggaaacaagggggaaaggaacccattttagctstttcaaatggcctgcctcgtgaggttcagagccgttacgcrgtgggatgtttcacctcccaaggggctgtcaccgtggctctctctgttcacagggaacagatggaatcccagttggaaaaggaggcccggttccgacagctgatggcccacagctcccacgactcggccattgacacggattccatggagtgggaaacggaagttgtagagttcgagagggagacggtaagctgcctctgatggttcttctctccttctctgatggatgaaggaggagacggtgacccgcttgcagtatctcccagtttcaccactccaagtttggaggttctccttttcctcccaggagtgtgaggcatcctttcccagcagctgtccaggctgggttgcagctggggaagggcagggtcctcggaggacgctgacagggatgtctgtctgcagtggccagaaggggcaggttgcagatactcataggtttccatcctggggatggagtgtcttatcagatgaggtgaagggacagtcccccacattggagtgggcagcttcggggcttaagagccaaatgtctctgtcactgctttgtgaaatgcgttgctgttgctgctgtttttgcaggaggatattgacttgaaggcactggggtttgatatggcagaaggtgtgaatgagccttgtttcccgggggactgtggcatatttgtcactaaagtggacaaaggaagcattgctgatggccgcttaaggtaagagttgaggcccaggctctggaggcaaggtggggcccttcttcccagtgcagaggacscgaagagarccaggtagcacttaggtgaacgtttcccagccttagactcacacacagtctgtccaaggcctgcagtctcagcagctaataatgctccgaaagaaacagtgcttctcagttgcctctgaatctgattattctttagttaccaggtactgtcttttgctcctttgggtgggaaagtgctcaaggggtatgcgtgagagcccaggatgtacatggcatgctcattcagggaaatagtcatgatgataaaatagctaacactattacagtgctatttgctgagtactggtttaagcactttatagaaattaattgattaatctttacaatcctacaaggtaggcgtgattattgcccccattttacatatgaagacgctgaggcctggaggggctaggtcatacaactagtaagtggtagggccaggatttgaacccaggctgtctaacctcagcatttgcaaatttcaccactgtgcactcctgcaagaggagattttctgagygtgtatgtgaggcacccactccttggcagtcagccccctgagtgagagttgtgggcggtagcygctggtcccacagcctgtgtgggtgctgaactggctgtgccctttctcagggtcaatgactggctgctgagaatcaacgatgtggacctcatcaacaaggacaagaagcaggccatcaaggcgctcctcaatggggagggggccatcaacatggtcgtgcggcggaggaagtccctgggtgggaaggtggtcacgccgctgcacatcaacctcagtggacagaaaggtagcgggcctgtgaacatggcagagtgcctcaggtggctggggcccttttttgtggacaggggccgggggtgccccttagagcacctcattcacagggatgaggggccaatgccatttaaatgtagcccatgtgcttttctggcaagaggtggtctgggccctgagtcttgctttctgagtgtttgattcaccagggtagatgtaactgagcccccgattggtgggactggggcagggtgcaggcgtagacagggcgcagcctgctgacatcctcttttgtaagaagatggtaacaaagatgaggtagggtgacccagggctgggcagcgaggccaggggctacccagtgacctcctgtggcttgcagacagtggcatcagtctggagaatggagtgtatgctgcygctgtgctgcctggaagccctgccgctaaagaagggtcccttgctgtgggagacaggatcgttgcggtaagtctcaagccagggtcatctgccgtgcataggcagattacatttgggaggtttgagcaagaagtaatgagcaaagtttttatattttccttgttstgggcattgtactatgtgaacatttaaaaataggtttcttgatggtatgtttctatttactgtagaaaattaggaaataaaaggtctgggagggaaataagaatcaattgcattgctaccacctgtagataacctttctctatctctctctgtccctcaggctggagtgcagtgaygcaatcccagctcactgcaacctccaaaggcctaagcgggaaataagaaccacttgctttggtaccacctgtagataacctctattaactttttttttttttttttttttttttgatatggagtcttgctctgtcacccaggttagaacgcagtggcgcaatcccggctcactgcaacctctgactttcgtgttcaagtgattctgctgcctcagcctcctgagtagttgggattacagggtgtgcaccaccatgcctggctaatttttgtacttttagtagagatggggtttcaccatgttggccaggctggtcttgaactcctgacctcaggtgatctgcccgccttggcttcccaaagttctgggattacaggcatgatccacagcacccagctttattaacattttaaatgtagttctctacatttaacattctcatgaatgtttatcaaggacaattaaaaaaattgacatcattgtgttgtgacttttaaatgccaccccttttttttttaactaaatgtaatacttatttttaaatttttttgttaccaaagtaagtcctgtttgttgtaaaacagccaagcaatataaaaatatgtaaagtgaaaagtggcagtccctttcttccccctttaatcctgctcctagagattgtccctgcccccatttagaagataagcacycagcccaaaccatatgtgcccctacaaatctatatatacctagatagatttcttggtgttgttttgcttatttatgtacagtaatgggatctgcaattygcatcctaccttggatatctttccaagtgtagcctggctaatgttacccaccttatggtattctgttgtttgattatatgtagtttaaattatccacctattgatggacatagaagttgttttcagggtctgcaattgcaaacagtcctgcattgaactttacctgtgtgcacagagcctctggagacatgtaatggtatctctgagactaagctacaaatgccgtgagattgctgagtcataggacatgcaaatttaatacttctgaccttttaaaattgaaaatgccagcggggcacggtggctcacgcccgtaatcatggcactttgggaggccgaggtgggtggatcacctgaggtagggagttcgagaccagcctggggaacgtggtgaaaccctgtctttactaaaaatacaaaaattagccgggcttggtggtgggtgcctgtaatcccagctactcgggaggctgaggcaggagaatcacttgaacctgggaggcagaggttgcagtgagccgagatcgtgccactgcactctagcctgggtgacagagcaagactcctgtctctaataaataaaaaacaaaaactgaaaatgccatacactttttcatggcatacatacaaaattccagtagtacaaaaggcaaatcgtgacaacaaatcttcctctggctagacctcttgtgtactgcttcccaccccgatggcaatcactgttaacaatttattatattatgtcccagacactttcaaaacatgtacatctcacacatttttggggggttgaggtaacctggatgggattataatatactcagttgctcatcttgctttttgtttttgtttttattattattttttaagatggagtatcactctgttgcccaggctggagtacaatggtgtgatctgggctcactgtagcctccgcctcccaggttcaagtaactatcctgcttcagcctcccaagtagctgagattacaggcatgcgccaccacacccagctaatttttgtacttttagtagagacggggtttcgccattttggccagcctggtctcgagctcctgacgtcaggtgatccacctgccttggcctctcaaagtgctgggattacagatgtgagccaccacgcccagccagattttagcagcatgtctttttgtttttatttttgtttgagatagcctcactctgttgcccaggctggagtgcagtggcgtgatcttggctcactgcarcctctgcctcccaggtctaagtgattctcctgcctcagccacctgagcagctgggattacagacatgtgccatcacgccctgctagtttttttgtatttttagtagagatgggggtttcaccatgttgcccaggctggtcttgaactcctgacctcaaacgatctgccctcagcctcctgaagtgctaggattacaggtgtgagccaccatgcccagcccacattcacgtctttagatctgccccaaggcatataactgcgtgtcattccttagtggcagcagcctaagttgttgaccagtccctcccgagggatagtctgggcatctctgcccttacttacatctgtgtcgtgctgcatggccactgacatgctacttcatagggacccaggagtgtgccctggggtacattcctgggggtggggtttgctgggtcagaggacatgaatgtttaacatccagcgagatcttccccctttgctccaaaaaggtcatggcttttgcagtcctccctgcagtgtgtgggggaactcattgcctcacatctttgccaatgtttttcagattttttggggagccagagtgtaaaagctatatggccactatgaaaattttttaaatgtggatatgttataaggaaaaaaccacaaattaatttactacttccagataatcactctgcagatattttaaaaagaaaacttgactggccgggcatggtggctcacgcctgtaatcctagcactttgggaggccgaggcgggtggattgccttagttcaggggttcgagaccagcctgggcaacacaatgaaaccccatctctactaaaatacaaaaatattagccgggcatggaggcatacatctgtaatcccagctactcgggagactgagataggagaattgcttgaacctgggaggcggaggttgcagcgagccgagatcatgcctctgcacttcagcctgagggacagagcgagactccatctcaaaaaaaaaaaagaaaacttgactttgaaatgattatagattcataggaagctgcagagatagtacaggggggtcctatgtactcttctccctgcttcccctcatggttgcaccttgcatgagtataatatcaaagctagcatattgacattggtactgtgtgtgtgtgtgtgtgtgtgtgtgtgtgtgtgtgtgtgtgtgtgtgtgtgtggttaaacacatgttgttctgtgtaaccaccaccgtaatgaagatacgtagctgttctatcagcactgaggtctccctcccactgcccatttgtagtaacaccccctgctccctcccatccctgccccctggcagctgattttttctccatctctgtgatgttgtccttttgagaatgttacagacatggaatcatatagtatgtgacctttggagctgggctgttttgattccgcaccatgcctgcaagatccacccaagaggctgcgtgtgctggctgcttgttacttatcgttgctgagcagtgttctgcaatgtgggtgtatcacagtttggtcattcaccggttgcacatatacttcttaagaaggtctgcacatagctgtgagcagagattccgggagcagggttgagaggttctttgtgaacactcacagggccccacttcgcgtggtactttctctacaaggcctttcctatccatggtcttgtttttagtcccccgctctcccgagccacatgcatgtatttatcttccatttcctctgtggaggcaaggagctgggaagttctgagccaaggtcccacgccacatggccgggcacagcagtgccaagatgttccctcygggtcctcggtgttctgatcccagaaggacatgctcctcccctagcctgctgtgaaggcttatgtgttcctctacctcagaatccccttagttggactccttgggcctcaccagaaagacctctatcctttgccaactcctgactttggcaccttgcatttggtgactgtctagcacaggaggttaggtaggcagagatcctgactggtaggcctgaggccrctctgcctgtggcctgacatgctctctgtcctgctctagatcaatggcattgcactggacaacaagtctctgaatgaatgtgaatctctgctgcgsagctgccaggactccctgaccctgtccctcctgaaggtaagggctggacctggctctgctctcacggtcaggagtatgggcagagccccggctccacatagccatgctactccttggggtcacaggatccttgagaacagggtgggcatttactgagtgcagagggggcaggaaccctgactggacgctggtctgaaatcaaaaaacagcagtcaaggccatgttgggcacagttgggtacatttgaatctggacccgataattagatgatcttagggaattgttgccagttttcctaggtatgatgatggcattggggttrttatacaggagaatggctttatttgggggaggtacaagctaaagttgttagaagtgatgtgtcatggccgggcatggttgctcatgcctgtaaccccaacactttgggaggccaaggcagtcgaatcacttgagcccagcaacacagcgagaccttgcctctacagaaaatacaaaaagcctgggaggtcgaggtggcagtgagttgtgattgtgccactgcactccagcctgggtgacaaagtgagaccctatctcaaaaatgaaaggaagaagctgggtgcaatggctcatgcctgtaatcccagcactttgggaggcgggtggatcacctgaggtcgggagttcgagaccagccttgaccaacatggagaaaccccgtctctactaaaaatacaaaaatagccggatgtgatggtgcattcctgtaatcccagctactcaggagactgaggcaggagaatcgcttgaacccaggaggcggaggttgcagtgagctgagatcacgcctttgcactccagcctgggcaataagagcgaacctctgtctcaaaaaaaaaaaaaaaggaagggaagtgacatgtcatgatatttgtaacttgctttccagtgttctgtagtatcattatagacaaaaagacaatttagtgaaatatttttgaatctagatggtacatttatggacatttattatacttttctacatatttgaaaagtttaataataggaagttagaaaaaataggccgaatttagaaaacatctcttaatgaaatggctgggcctattttttctaactttctattaagagatgttttctaaattaactattttcaaattatttgacttttttggaagcagttttatgtttacagaaaagttgggctgatacagaattcttagcactctctcaaccaccccatcaccaccatccccactcctgtccccaagtttccccaattttggcattttgcrttagtgtagttagtacatgcgttataattagtgagccaatgtggatgcattagtattaactataatgcatagtttacattaaggttcagtcttggtgtattttctgtgagttttgatgcaggtgatgacatgtactaccattgtaatatcatacagagtagtttcactgctctaaaaattccctatgctccccatatttatgcaagcccctggcaacaactgatccttttactgcctccatgcttttgtgttttccagaatgccatagagttggaatcacagagtgtatagaatggcttcttcatttgctaatatacacttaaggttcctgcacgttgtttcagttctttttagtgctaatttatattccgttgtctgggtgtaccacaagagatatatttttaacaatgaatttttacttttatgtttaatatttaaaaaaaatattcaagacattatgcaggtaatttccttctttttgagacagagtctcattgtgtcgcccagactggagtgcagtggcgtgatcttagttcactgcaacctccacctccgggttcaagcgattctcctgcctcagcctcccaagtagctgggactrcaggtgcatgccaccgtgcctggcttatwtttgtaatttttgtatagatggggtttcaccatatcggtcaggctggtctcgaactcctgacctcgtgacccgcctgcctcagcctaccaaagcgctgggattacaggcatgagccactgtgcccggcccagataatttcagaaagtgttcaaagttaagaaaactttgactcttctttgagttcagagtgaccagagccatgagaaaacttatccattagggagaagcatatgtgttcatgtgtgtgtgcatctctgtctatctgtctcttttttaaggggcaggtggcccattcctgaccattgctttacctctggggatggttttcagtggcagctccaagtcctgccatctcactctctctctcactcctctgcaatccctgcctaggtattccctcagagctcctcgtggagtggccagaacatttttgaaaatatcaaagactctgataagatgctgagttttcgagcccatggcccggaggtccaggctcataacaaacggaacttgatacagcacaataactccacgcagacagacatcttctacacggacaggctggaagacaggaaggagccaggccccccaggaggcagcagctcctttctgcataagccattccctgggggacccttgcaggtctgcccccaggcctgtcccagtgcctctgagcgtagcctgagctccttccgctcagatgcctctggggaccgtggctttgggctggtggacgtgcgtggccggcggccactgctgccctttgagaccgaggtgggcccctgtggggttggggaggcctccctggacaaggcagactctgaaggctccaacagcggcgggacctggcccaaggccatgctcagctccacggcagtgcctgagaagctctctgtttataaaaagccaaagcaaagaaagtccatctttgaccctaacactttcaaacgcccccagacaccccccaaaatagactacctgcttccaggtcctgggcctgctcactctccccagccctccaagagggcggggcctctgacacccccaaaacctcccagaaggagcgactccattaagttccagcacaggctggagactagctccgagtcagaagccactctggtgggcagctccccatccactagtcccccgagcgccctgccccctgacgtggaccccggggagcccatgcacgcatcaccccctcgcaaggccagggtccgcattgcttccagctactaccctgaaggagatggggactcctcccacctgccggccaagaaatcctgtgatgaggacctcacctcccagaaggtggatgagctggggcagaagcgtcgccggccaaaatctgctcccagttttcggccgaagcttgctccagtagtgattcctgctcagttcctggaggtatagctgagccccagggtgtggggaggggaggcctagagaggggcagttggcygaaggagggctgctaagtggccctgcaccagtgtcccaggcccctgtttagcctggtgcctttgcctttgctgttggactyaagtgggaagtggcccagctaggaggtaggtaagtggcgtggaagtgcatggtagtgggagtgtgacacaagaggggaacactttattgggcatagcatttggtttgcttttttaataagaagcttttgaacttacacaataaaacctagggcatagacttgccttgaagggctagggagatgaggtggcacgtgtgaggctgagtgggcagcgggacggcctgattgcgtgtgctgtcatagtttccagaagggtgagattgctggggactgtggaaagcatctcaggcaccagtccacactgctcactggggacaaagagcttcgcacagccctccacatcgggcagagttgtacgtgcctgatgcacttgtgcattctcaccttttacgtgatctctgtgaaagattcattctctgtggttttcttctgaagtaaagctgcttccttgaagatgtgtaaggcaacatgaatgggcagcgttcccattcatgtcccttcctgtgccccagtgggaggagctggttcctggggggcagaaactggcttgcagagctgctcaagcgttccactgtttggtttttttttttttttttcccctaagatggagtctcactctgtcacccaggctggagtacagtggtgcagtcttggctcactgcaacttctgcctcccgagttcaagcgattctcctgcctcagcctcccaagtagctgggattacaggcacccactaccatgcccagctaatttttgtatttttggtagagacgggatttcgccatgttggccagggtggtcttgaactcctgaccttaggtgatctgcccgcctcggcctcccagagtgctgggattataggtgtgagccactgcgcctggccacactccactctttctagcagacactcttgcccttgcatctgcaggaacagaagtgtgtcccggccagtggagaactctccccggagctccaggagtgggcaccttactcgcctgggcattccagccggcacagcaaccccccgctataccctagcaggccgtctgtgggtgagtcagccagccaggggctggggctgagggtcggtgtaaactcgggatgcctagtctccagggagaggggaggcagcatttcagagagctgccatgtgttttcagccctgaggtccagagaactgggaaatgctgtcctgtctgggatggtttgtcttatagccatgacatgtcttagcttgtcaacatgctttctccccatagcaacctgggaaataggaagcatgaaagagacttcccccctttttacaaatggagacaggccaggagccacagccacattgtgaattggtggttaaaactcatctcccaagtccttttcccaaaagactgcggctgcgtcctgggatacaggggaaaggcttgtgtaagtcctgggctggctgggtcctttggggngtcttttctcaccaagcccatttctaggyactgttccccggagtttgacccccagcaccactgtgagctccatcctgcggaaccccatctacactgtgcgcagtcacagggtcggcccctgcagctctccacctgcggcccgagatgctggcccccagggtttgcatcccaggtatgtgaaggcaccctacgcttctctgtacnccagctgcccaagcctgcctggacatggaaccatgagtgcataaagaggctcattggtggagaagcttccttgcctgcctgggaggggactggctagagcagcacagggaaagggagccttagggctgctttctgaattcatcagcacaaggtttcaaaaggtactggaaggacacgatagtgatagcagctgatgtttgagtgcttatgtcccagccactgtgctcagacctttatgaatatcatttcaccgaatcaacagcaacctcatgggctaagtcctattactgtttctgtcttgaagatgaggaaactggtacttcataagagggtgggctggctccaagccactcttattcattcatttgacagatattttttgagcacctactacatgccttggtctatcctaattataagaggatacattgctgaactaaacaaattagcttctagctcatgtcgtktggtttttcaaatgtgggaggcagacaaaaaaaaaaatgaacgaagtgatatcagatggtgccaagaggctatgaaggcagtcaaacagggtgacaggctgggctgtaacttggaagagggtggcaagttagagtgggtggtcaggaagggccctgtggcagaggggatgctgctgtgaccagaaggatgaaagaggccagctgcacaagacctgggctggagcctccagggagaagggccatcggtgccaaggccagggcacccaggcacagtcgtgggagcttgkcaaaggggcagcgagtcaagaagaggtttgaggtcacagggcacaaascctgtgggacctgcagcsgtgatgaagagtttggattttattctaaggacagtggagaccactgtagagtttaagcagggaagagatgtcacctcattacatagctggaaaaagatgctgttgaggcctggtctcagggcagcctgatgtgggcgatccctgctctgcccttcattttcttaggcacgctgtcccgagtgaggcacataggtcccctccccaaagtcctctgtgccttgtctctccttacccacttcctgggaggacaggttccccctccccaggcccacccaggttgcaaaacctctgttttttatcacttcttcctagtgagcctaatcctgaccctatggctggagtgggtatgatactgaccgccccatgtgtgtggccctttctacttcctgaaggctcttagtggatgccacctccgggagtggctgagggcagcctgctatcctcggctgataatcagtggctcctgggcctcccttctgcccgcttgggaacccttgcctggtctgtgtgtttctccccagtggccacatctgttcctggttctcctcccgaactcctcacctcttgtttttacgcagtgtccagcaccagggacgcctgagcctggacctgagccacaggacctgcagcgactactccgagatgagagccacccatgggtccaactcactgccctccagcgcccgcctgggtaactgcaccacttggactttgtgctgcagagggtgccaagcttttcatctctgcctgcatcctaatgtccagatctgcgggtgggctccccacacgagctcctgtcacctcctgggactgagctsatttctctactgggaagggctgcttccttcatgggccagccatgcccatgctgctgtcagagccattgctttcgccttccgctttctgtgggggccttatggycattcaggtgacccctcagctaggagccttgctctgtgtccctgaggttgttggcctcattctggactgttttgtatggctcttcatacatttttgtatggaaagtgaaccccagaggagagtcggacaaaggtagcccatggagatcttggggaactctggcgctggggagaaaagatggagcagctgccgtgtctcttaggctgctgttccgtggctggaagtgagacttgtgcgctcctgttctggagcagtctgggcctgcacagttcattgagataaatgttaaacgtctgcttttctkgactgttccatatcaaggctcccttgggaataaacagcagggcccagctttgcatttattatcctgantggtagcctggtggagaggaaggacagggtggtgtttaaccatgaggcctgaagttttgttcccttatggaacaataggttcttcgagtaacttgcagttcaaggcggaacgcattaaaatcccatcaacaccaagatatccgcggagtgtcgtgggctcygagagaggtaaggacttctcgacattcccatctctcctgcttttcctgcggtctgactcctcatggtggagtctctgggcttagctgagaacttcatagtcatctcagtcagtcagtaaaaattcactgagcccagcagtaggcctggtggtgtggggggtagggggcaatgcagagcctagcatctgagctccagactatgcgatgcagtggggatagagctgtgtgtctggatcgcacctgcctcttggtcttggctgttggggaagtgagatgggagttcacaccggcattacccgctcctctctgcaggttcagtgtcacattctgaatgcagcactcctccacagtcacccctgaacatcgacaccctgtcctcttgtagccagtcccagacctcagcctccacattgcccagaatcgctgtcaaccccgcgtccctcggggagcggagaaaggacaggtgagcatggccggtcatcggtggagtgggtaaaccagtggacagtgtgcatcccggcagcgggcctgggctctgcagggaaggggcttagtagaagcagcaggagtagcttgagtgtcccagcatttgctggygtcaccagtaagtgccatggggcactggatgcagggaggtggggcgtgtgtggatggcarggcagggagccaagagggctcacagtagatgatgctggaaatgacctgacggtgatcgtgccatcatggcaccatttacaccttcctgggcccttgttcaagcactttacgtgtggctaagtcacgagatccttacagggaccctgccagtgtcgttattattgttatccctgtttcacagttgaggaaactggatccagacgttggagtgacagacctgtggccacgtggttagyggctggcaccgggactcattcttaccctttgctttttccctctcattcgaagctttctgttgtgaaataaaatatacacaggaagaaagcataaatgtgcagcctagctttttactggtactggttcattttagaatgtaggtccatcttaggtttcaggttgactgtaggcttgctgtctgtccagaggcacctcctccatggaatccgtcacccccgcgcactgtgcacacacatccctctctgttgttcccctagatggaacttactagattgtgtttatatttaacagcttctgtctagattgtagatcttaaagagctctgataaacttacttttatttaatcaccaaaagaaacacagatactctctttcatttgagtccagaaagctgaggcctctgtagctgtgagcctcagcaggggtgggccctatgttaagaaaacatatttttttttgagacagagttttgctcttttcgcccaggctggagtacagtggtgcaatcttggctcactgcaatctctgcctcccaagttcaaggygattcttgtgcctcagcctcctgagtagctgagattacaggcgcccaccaccacgcctggctaatttttgtatttttagtagagatagggtttcaccatgttggtcaagcttrtcttgaactcctgacctcaggtgatccacccgcctcggcctcccacagtgttgggattacagacgtgagccaccgtgcccagccagagaaaatcttatatttgacttgaaaatctgaacttaaaaggcaaccaaccagagaacctgaggggtaacggaaggacagcaaaacacagaggcctggccccmgtaggggaatcgggtgtaactcggaagaaatgctgacggagctcttaccatgtggcacgcgcaggagcatgctggcctgttttactcagccccggccctggccacagagaggacgggaccttccccaagtgaagtgggttcttcagttgtggaaaaggccttgccacccactgccaagcattcccttagctccccacagggcacggagagccaggacctgctccaggagggagaaaaatgtgagtgactcctgccctcacggtggttaggatccgattggagatgaaatttgacatgtgtgacctgactgagcaacagctttctttttaaaaatggccccgtttcccagattctgaagtacagtattttatacttgttatggaaaatcagagacatagaaaagtagaaagaaggccgagtgctgtggttcacacctgtaaggaggccgaggcaggtggatcactggaggtcaggagttcaagaccaacctggccaacatggtgaaaccccgtctctactaaaaatacaaaaattagccaggcacggtggcaggcacctgtagtccctgctactcaggaggctgaggcaggagaattgcttgaacccgggaggcggaggttgcagtgagctgagattgcrccactgcactccagcctgggtgacagagcgagactctgtctcaaaaaataaaaaacagaaaagtagaaagaagaaaaaagtcacagattatttcttcaacaagagattcaattgccattaccctttggakatatatatatatatatatatatatatatatatatatatataaacatgctttattatttatgtacataatcaaatctcccttaatattatgtttttagctatttttaatagtttaagtatactttataaacctcttttgagaagcagctgttgtttagagaaaacttctatgcatattacaaacaattcaaatcattcagaagactataaagtaaagattatctctggctgggcgcggtagcctatgcctgtaatcccagcactttgggtggctgagacgggcatatcacctgaggtcaggggttcgagaccagcctggccaacatggtgaaaccctgtctctactaaaaatacaaaaattagctgggcgtgatggtgtacacctgtaatcccagctacttgagaggctgaggcaggagaatcattggaacccaggaggtggaattgcagcaagctgagatcatgccactgcactccaccctgggtgacagagcaagaatctgcctccaaaaaaaaagaaagaaaaaaaagattagctcagatcccctcaactggagacaccattgttaacacttggtaatgtcctacataagaagcctccttgtgcataaatccacacatacttttgtttgcagatgcagataaatataagtgaaatgatgccgatcgggcctccccacccygtggtgtgtcccttacgtctttgcatgtcactggaacctgggaacctggttcagatcattgttctrttgggtggctattgctgtgacttagttgcttgctcctttattgtgatacacgtgttgtacggaggtggacctctttctgctctgggcctctgtttcatcatctaaggctggggcaggagggtgatgtaggggtggctgtgtgctgagggctctgcagctctcaacagcacggggctgtaatccgtgttgaattggaagggacygtgggtgtagtctggggtggatctgtctgagctggagggtcaagggaggatttccagagtgggcaagtttgggaagtgggaacactttggagggtgggagagagcagggacaactcaagaagaattttaatttccccttcccaagagggctggggcatagggccacaggctgagactgccaagtgggaagctgctctgcctccaggtggccggggtggggtggtttaggtgcctccccgctagaatctatcctgaccatgtgctgtagaggggacctggactggccccctcagcctttggctatatggttttatcctgcgaggaaaatctcaggtgtccataccttggaggaatgaagccctgagtggcgtgaagtcccaacgggaggctccgcatcacttgactgtcttttctgttatgttccaggtgtctctgattgtctttctcctctgagcgtcccttatcttctttctaacctttgtcaccttccagatgtctctgccaccacagatctcttctgaggctgcccgtggccaccaggcccaggtcttccaccatgcagttggcctgcccagaggctccctgccgagcccctgccccggcgcccttgggtgcactgtacagccccagggcagcaagtgcatggctgcagccttgctcccagccttctccctttacaaaggcttgggtctgcagcagcttaatttccgtgaccagtttgcatcactctgtgtagccagtaaacataaaactggattattttctgttgcccccttaggatggaatgtcatcccaggagccatctcttttcctcggagggcatctcaagaccccccagagtttgtaattgcatattgtggggcagctcctctcctgtaatgaaaatccacatgtatcagtgtttatagttcacayggaccgttctctgygtctttggcctgggtggttgcgtgtctgcgtgtgctgtgctcgtgttgcgtgaggctgtgggaatgtgatcgtttgtcacacaggggtgggcccaccatgtccccatgtagctgtgtcacaatgggagcatccaggctcggggccctttctgcactgtcagatcatatgcctgatcagagagctcaggctctccccaacccttttgtttgaccctgagtccccgaaacttttgacttttccttaggccttatgtggaggagccacgccacgtgaaggtgcagaagggctcagagccgctgggcatctccatcgtgagtggagagaagggcggcatctacgtctccaaggtgaccgtggggagcatcgctcaccaggctggcctcgagtatggggatcagttactggaggtgagagggagctgccctcctgcatggcgcccatggaaacctgcacttcttccccctctcctcctcctagggaacagcastgctcccaagtccccagggcctcctccctgtccacagccccgaccccccmactgagcccatcctggtgtttccccagttcaacggcataaacctgcggagcgccacggagcagcaggcgcggctcatcatcgggcagcagtgtgataccatcaccatcctggcccagtacaacccccacgtgcaccagctcagcagccactcccggtccaggtgagtgcgggcctcccagggccgtctgggctgggggtggagaggtgggtgcagcagcactctgctcattttagggagacccagggtgccagccgtaagttctggggatcctactgctgctaaagagagagttgaccagccctggattttggaaaaggggcatatatagagaggctgtctcctcctgaaatggggtgtggaaacagatggctgtggtccccctgaccagcaggggcccatggtagccaggagttgtggccccgggggtggattctcactcaaagtgtttggctccctgtccaggagcagatgctgtacacctgtctgtatctgcccctgagctgtgggttgaagggcagaaaagaaggggaggcatgccctgcagtgctgcgccacaagctcagcaggagagatgggatgcacaggcagaggaaaagagacaggatgctcacagcttcctgaggtcagatgcctttggagagggcccctgagctgaggacaggtggaggggagaggacaggtggatgtcatgggtccaggcttctaatgtgtctgctctgctcagggcacaggntgcagggctatgtgacctggtccccatttatagctcagatctagttgccacaggagtgggggtggctctgggtggcttcgtactgctccttatccctcctgtcctccgcctccagctcacacctggaccctgccggtacccactccactctccagggcagtggcaccaccaccccggagcatccatctgtcatcgacccactgatggagcaggacgaggggcctagcaccccccmagccaagcagagcagctccaggtcagcagacgttgctgtgagccttccctgtgtccgcttcggctgggtggggctgagcacattctccaagtggcgtgggcactgggcagctggcctcatgtgctgcaggccgcacaccaggtcttcaggagttgggccgggagcacggcattccttttttccttccctactctctcttttcctttctctttttctcctgttttctattgacttgttttttcccctgcatcttctctttctcttctccttttcttgttcactcgctttctgagtctgtctttggacacattcccacagtcatcacccggccaggccctgggctctggccacccacagcagtgcttcccccaatgaggtggcagaccagtgccgggcacgtgcagcagagtcagggtgctgggagggcactgccggccgccgcagagcaggcaggaagatcactggagtgtggcaggggaggtggcagctggattaaaatgttcaggacaggcaagagccaagagtgggcataaagagaagtccaggccgagggagcagcagagttcaggaggaggaaggagctccatgggagctgcacagcgtccagcctggcctggggctgcagggagggccatccaggccatggtgtgacatgatcactctgccgtcctggaggagctgtgtctccagcactgagaggccttcaccaagccctgggcagcatctcacagaatgaggccagctctgcattctctataccagagtctgtcacattggaacttacctgctgcaaggttttcctcccgggctggcatctcccctgaagccccctgtatctgtttccatcgctgtcccatctcactccctccatgtgttcagcagcttactttcagcttcccttccttgattgtaagtgccttgatggcaaggggcccctcttcacaagttagcagttgctggtctatagaagcttcttcgtagacatttgctgaatacattgctgtgctctggacagtgaggccaactttacctttccttaggaagtactaagttaggaaaatgagtgtgatccacatgggaggraggccatcctgatctttaaggcatgagattgatagccgggcctgggagcaggggcactgatttacggttttgactgcccccgctaactggctttggacctggggtcttgccttcatctccagtgcaccttagcatcctgtcccgaacgccgagccagtagaastagaggccacctctcagctccctgtggttctgagaccccaagaagcaggcagaaagcggttagggcattggccactgctttgtctttttgtgcctcctctttgtgcacagttgaggaactttgtttttttcctgaaaggattgcgggagatgccaacaagaagaccctggagccacgcgttgtcttcatcaaaaagtcccagctggagcttggggtgcacttgtgtggtgggaacctgcatggggtgtttgtggccgaggtggaggatgacagtcctgccaagggtcctgacggcctcgtgccaggggacctcatcctggaggtgagttctgagctgctgagcaggccaggcctccatctacctgcacagtgggcttgctgccatctcaggtggcaccaaagacggaggagtacagcctctcatctggtgagccagtcagggctgacttttgttgttgttgttgaggcagagtcttgctctgtcgcccaggctggagtgcactggcacaatctcagctcactgcaaccttcacttcccaggttcaagcgattctcctgcctcagccttccgagtagctgggactacaggcatgtgccacgatacccggctaatttttatattttcagtagagaccagtttcaccatgttgcccaggctggtctcaaactcctgacctcaagtgatctgcccgcctcggccttccaaactgctgtgattataggcatgagctaccgtgtccagcctcaggattgattttttttttttttgagacagagttttgcccttgttgcccaggctggagtgcagtggtgcaatctcaactcaccacaacctccgcctcccaggttcaagcgattctcctgcctcagcctcctgagtagctgagattacaggcatgcgccaacacgcccagctaatttatttttgtattttttgtagagacggggtttcatcatgttggccaggctggtctcaaactcctgacctcaggtgatccacccgcctyggcctcccaaagtacagggattacaggcgtgagccactgtgcctggccagggttgatttttaatccctgtaaacccagaatcctgccaagcccttctgaggaggtccctgtgaagccaggcaggccattgagggaacctgagggcagagccttggctcaggccctgggcatcaggkggtgctcgccctcaggtgatgtagctgcaggactctgttctgatgagagaggatggtctttctctgtggtctcctgcctcatgggggagatggtttgtgagaatataaaggcacaagttgggctgggtttggtggctcacacctgtgaattttaggaggccaaggtgggagaattagttgagcccaagagttcaagaccggcctgggcaacatagtgagaccctgtctttacagaaaacaaaacaaaaaaattagccaggtgtggtggagtgtgcctgttgtcccagctattctggaggctgaggtgggaggatcacttgagcctaagaggtataggctactgtgagctgtgattgcaccactgcactcagtctgtgtgacagagggagaccctgtttcagaaaataaataaataaaagcacaggcaacatcagcaagaggaaggtccctattctgaaaagcccagacttgccagtcaccagaacagggtttttcctggataagctgtcaagggcagggcagccacttggcagaggacctggtgtccagggagcatgcacaggacctggagactggggagaccatgaagactcagtccttcctgcagaggggaggtagccagagtctcagttaargagggatgttgaawttctgccgtatggtcagcastggcccctctcrggtgcccaagctgccccctggcttctgccttctgatgcatccacccccatccctggcagtatggcagcctggacgtgcggaacaagacagtggaggaagtctatgtggagatgctgaagcccagggatggcgtccgcctgaaggtgcagtaccgccctgaggagttcacgaaggccaagggcctgcctggtgacagcttctacatcaggtaccagtggctggggaatcggtgggagatttggaaccagaggagaggctttcactggagactcttttcctggtgaatggctctctgtttcttgccccccaaggctggggccatgatcatcattccttgacactcaatctgcacgcttatttatgttgagatgattgtgacttagaacaaccctttagggcttaaagaaccagctgggccccctctttagggcttaagacctagagaatttggaggcagtcaagccccgttttcctgtgtgctgtgctcctctttttctggtgtcccccaagccaggtttgcagatccctctgcagtgtgtgtggacttccaggcatcttcagtgcccttactactgtatgaaatgctgtgggcatttagggatggcagcaggctttctaggaggagctcagagctttcttcacatttcctaagatccaagatcrcagaaagcatgagaacactgatgcggtacaactccctgtctctagggtagaagatgacatatttccatcctagagagattccagtctgtaggaaccaggggccgggcctgggcttcgaggagggaggcaactgggaaaggccacctggaaagggaagttatggcctcagatcttggtgagttctttgatggggatgcgccctcagtgttaggggagcaaaggcagtctttgcccctttatgtaaaacacagggctccccactttgagaatcaccaccctcggcgattcctgatcaagtttggagacagcccaaagcagaatggcagccttaggggcctggccacagaaggcacctggttcgtccttggtggccagagccgcctgatcgtgttccttctgtgctgtggtccagggycctgtacgaccggctggcagatgtggagcaagagttgagctttaagaaggaygacatcctctacgtggatgacaccttaccccagggcacgttcgggtcctggatggcttggcagctggacgagaatgcccagaagatccagcgcgggcagattcccagcaaatatgtgtaagtgttctccgggcctggggtggggtggggcaggggtcgccgagggccaccagccatggagctgtcccatgggagggggctggggccagggctgctggaggagggrttctgcttcttatcttagcttctgctctctacattttgccamaagtgctggtctaaaaagctgctcctagtgtgagtcagtgctgtatagagcacagtgatgggtcagaaggcataacgtgttttagaaaaatggatttatggagatactcgtgccttgccgctccctcaaagtgtaccattcagtggttttcaacatattgataggtgtgtgcagccgccactacagttaattttagagcatttccrtcacctcaaacaaaccccagacccattagctgtcagccccttatcccactgtcctcccacccagccctcagccctaggcagccactactttacttttgatacccatgggtctccctgtctggacttctgtgtggttgggattgcatagtgtggcctttcatctggctcctgtcactgagcatgttttcgaggcagcctgcatccctgcatcatttcccttctatggcaggaagcgtaactcgtcatgtcaccaattgaaggctgtcctagcagttccttttgacaccgagctgaatatgctgtagtagaaaaaatcgcctgctctgagagcttgccctggtgctggtgtttgtgtcacccccgcagcatgtaccgagggttcccaggggcgtgggaggagatgtagccttgagacctgccaaggagtgtggggggagcccagtgtctggcccacctttgcttttctcaccaggaagggcaggaagggcagggcagcagggtctngatggccctgcccagcattgtcccctgtgccacaggatggaccaagaattctccaggaggctcagcatgtctgaagtcaaagatgacaatagcgccacaaagacgctgtcagcggctgcacgccgrtccttttttcggaggaaacacaagcacaaacgcagcgggtccaaggacgggaaagacctgctcgccttggatgccttttccagtgactccattccactctttgaaggcaagtggctgagctcattttccagtgggctctccagatggggcttgctgtggatccaggagctccacaacagggacttaaacaaaagagagtcttactttgcttttgtgcgcaagtctgaaggtgtgtgttcggcttggtcggggggtgctgccatcttcagagccacatctatggggtgtggcttccatcctcccagtcaccgcctgtcaatgcagctgcagccatcatgtccctgtttcaggcagcaggaggaaggaaggagtggtaaggcagaagtgtgcctcagctgagcgtgcctctttcagcagctatctggaagccctaacctgtgacttcaacttgcatctcattgtccacttgcatgtgcaagagaggtcaaaaaggcatgttttggccaggcacagtggctcacacgtttaatcccagcactttgggaggctgaggtgggtggatcacctgaggtcaggagttcaagaccagcctggccaacatggtgaaaccctgtctctattaaaaatacaaaaattagccaggtgtggtggcatgcacctgtaatcccagctacttgggaggctgaggcaggagaatcvcttgaacccaggaggcggaggtgcagtgagccaagatcacgccaccgtactccagcctgggtgacagagcaagatcctgtctcaaaaaataattaaaaagaaaaggcatgttttagctgggtgcattgctggcctcagtaagaggttcagttactgaggaagaatggagggatagctattgggtaggcaagaagcaatctctgctgagtgccttgcttgccatttgtttttaggttcttacaggctgcttggtagtgaccaagagctgtcggtttctgcagaacttcggcatttctggcctcrgtcctgtgttcatkaacaagtcttgtataatccttatggagcaagatgctagtccagggctggagttgagtgataggagatgtcagacatcccctggtagacagcccttgtggaaaggatgcatttgtcctttaaagcaagaggcccttaggaacgtggctcccagggccctggtgtgtgtctactgtctactgtcctagaatgtgccctccctggcaatcaggtgtgggggtggcagtgagcagcagagtgtagggcagctggctgcctccctccctctcttcgctttttacaatgaagaccttaggcctagggagttcagtggatcacactgtagttcatggcccactgtcactatcagctgggacaagggttggcaaactattggccatggaccgagtctggactactgcctatttttaaatggtctgtgagctgagcatgggtttttacacttcttaaaatgtaagatgtaaaaaagtctattagccctttgctgatawcaattgcttaattttgccgttttgccttcaaagcctaaaatatttactatcttgcccyttatagaaaaagtttaggccaggcatggtggcgcatgcctgtaatcccagcactttgggaagccgaggtgggtggatcacttgaggcagggagttcaagaccagcctggccaacatggtgaaaccccatctctactaaaaaatacaaaaattagcctggtgtggtggctcatgcctgtagttccagctaccgaagaggctgaggcaggaagatagcttcagcctgggaggtcaagagctgcagtgaactgtgatcacgccactgcactctagcccaggcaacagagtgagaacctgtctcaaaaaaaaaaaaaaaaaatgccaacctgttactcaaggcaaggtttctctcttattttgctttttgttttttttccttcactctctttggcctccactcttgtgccctctgctcctttctccgtaggtgccatctccattatgtttggcatttgtcyggtggtgctagtgtctttaaaaaatagccctttgtctattcttccttttagctcttcaggtgtttttcaatatatatcttgaagttgtcgttagatacatacaccttttgcattgttacaccttcctggtaaattaacctttttatcgttataaaatgcccttcttgatctccaggaatgtttcttkctgaaagtctattttacgtgatatttttattgacattaccagttttcttttggttatctttggcacagtttatctttttcttttacttcaaacttttctgtcactttatatttaaatatcccttataagcagcatgtgggactttttaaatccactgtggcaatctgtctttttaaaaattttatccaagtgtaacatacatacagcaatgcacacattcatttacagaaaagtgagcagtgtgaggaatttccacaatctgaacacccctgtggcagtcttgattgtttcatcaagagtatttacctcattacataaagtagacatttcccatcttactgtttgttttctattcattctacctcgtttatgtttgtcccttctttcttgctttttaaaaatgaatcatgtgttttgttttattctgcccctatatcatctactgttatcctctcacatccactagtgtttagttgtttctattttattcttttgggggttaaaatagacctcacagtgtgcacctttgacttactgctaagagaaatcattgctttggccacttccctgataattctaagacatcaaaccactaactccatttatytcttttctaactttgatactattcgcattttatttttttattattttattttttgaggcagaatctcgctctgtcgcccaggccggagtgcaatggtacgatctcggctcrctgcaacctctgcctcccaggttcaagcgattttcctgcctcagcctgccgagtagctgggattacaggtgcctgtcaccacatctggctaatttttgtatttttagtaaagacggggtttcaccatgttggccaggctggtcttgaaactcctgacctcaagtgagccrcctgtcttagcctcacaaagtgcaaggcactgcrcccgggattacaggcgcaaggcactgtccccggccatacttttctcattttaattctacagatactttaactctgactcagtctgtccatttgcacatcaattattcatcggtttttgccttttacatttccattgctctttattccttcctgcagttttgtgcttctgattttgttttctttctgctgaacaacttgcagaaatgtttttcttgtagtgcaggttttttggtgacacatcctgtcagtgtttgtgtctgaaaatgtccattttaatatcgtttttggagattctcactggatatagaattttagattggtggatgttttacttgggtgctttaaagatatcattcctggtccctggctctctttgtgtagtagtttcctgtggccgctgtacccaattaccacagactgtgtggcttcaaacacacaggtttatcctcccacagttctggaggccagaagtccacactcaggaccactgggtcagtcaaattgttggccaaccttcgctccctccgggcttgaggagagagcctgttccttgcccctcccagcttctggtggctgctgccaagcctttgctgtggccacatcactgtcatcttcaaatctcatctgctccatcttcacgtcacctcgtcctccacgtgggtctctctctcaactccctctgcctctcagaggacccgtggggttttatttaggacccacccagatactccaggaaaagcccttcctcccaaggcctttaactgaatcatcgcttcttttgttgcataaggtgtaatgctcatgggatctggggcttaggacatgagtcagtctttgggggacacttgtcagcctgccacactcattgctggtgagaagtcatctttccaggctcagtgctgaaggcagtgccaccacccgtccaccaccatgagtgggtagggttttctctgccttcctttctcagaaagaaacttcttaatttcttaccacaccgtgcttcccccrtgtggttttctttgtgttyatcctgctcagaaggtgcttagcactttttacatctgtagtttggtggtgtggtcggttttggagattcctggccgcagtttctttcatattgcttctgtgctgaccttgcctctcctcggggtttttgttcttcgacaataccctgtctgtctcctgtcttctgggctctttttctcctgcattttccactctytctttctctccatgattcagccagcctggttgttttctactcttttttcctgttcattattccactcttctgttgcatccattatgttcttactttcagaagttgtattttatttatcactctagagtttccacttggttcttttttaccaggctttaattctctgctgagactttccctcttgtcatctgtcctcttaaatacttgaatcatatgtttgtaaagactgcgtttggtaactgtcatgtgtggtcatccctgagtctctttctgtggtctttgtttttcttggtcctgccccatgatatgcctrgttattgtttattgagatgtcagaagttatgtttaggggattttcagggctccgagtgatgttgccagcttccagagagggtctgccctctgctctggagatagccgctgctcgcagatcactttgatccagccacagactcagctgacctcaggctgggttgcagcttttgtgcagctggtggttcacctgaccctagggggtggcccaccagtggtcccagcctggggtgttccctagggccgctcttccctagggagccttgacttccagtttctcactcttcagcactgggaggccatggaacactgctcagtgtcttagtgactgtcttagatgcttagcttcttgcttttcacagcttaagaatttggcaaatggctttaagggaaaacctgtgataccagacttagttctttgcccttcccttcctctggaataatgacccaccaggtcctggcagccctgaactccgttttgatctcacctgctttggagattttcagaaacttttcgtgggttctcagccctcagcggcggccccrtgcctgggttctcagcccctcagcggcggccccgtgcctgggttctcagcccctcagsggcggccccgtgcctgggttctcagcccctcagcggcggccctctgcctgggttctctgcccctcactctcactttagaagtctccagttgctctgaagggggaaaggcctgcagaatgtcagcttctaatactccagtttccttctctccaggatcttggcatctcaaattctgtcttgtctctgccactctacgatgccttcaaaaagatatttctcattttttacccagattttctaggtgttctccaagggatgctgcaagctgttccattatacctgggagtggtaatccctgtgtagtagtttaaaagttaccccagctaattctaatgcacagtgggttttgaattcctgctttagtttattgcttccaactgctgcatagcatccctggtaccccccaccctgctgattgtgcacccacctgcaatggtctaagtggactcaactctccaccacccagaggacactgcatgtctttatgcttgctcttttaggggcttgtgcgggagtgtctcaggaatatatggaggactggktttcctcttatgttagtctgctagggctgctgtaaccaaataccacaggccaggcacggtagctcacacctgtaatcccagcactttgggaagctgaggcaagaggatcgcttgaggccaggagtttgagaccagcctgggcaacatggcaagactcccatctctacaaaaactttaaaaaactaatcaagtgtggtggcgtgtgcctgtagtcccggctactcaggaggctgaggctggaggatcacctaagcccaggagtacagtgctgcgatgagctatgattgtgccactccacttcagcctggcaacaaagcaagagcatatmtcaaaaacaaaaacaaaccaaaaaaccaataccacagactaggtgacttaaataacaagaattcattttctcacagttcttgaggttggaaatccgagatctgggtgccagtgtggttggttctggtgagggctgtcatcctgccttgtacgcagctgcctccttgctgtgtcctcacatgttggagacagagagatctctggtgtctcttcctcttaaaaagccgcagttctatcagattagggccttgctcttctgacctcatttaacttayctcctgaagactccgtctccaaaggtagtcacactggggcttagggcttcaacatataaatgtcgaggggacatagttcagtccacagcaccttttaaagaaagccattgccgtatggtctaaggttggaacccccaggaccatgcctttgctctgccctgattagctgtgaccttggataggctgtttttcttctccagttggagtcagtgactcataagatgctgtctagtcttacaattctgtaattgtgaggacatctgacaaagaagattgtcagggaggaaaaagaatctcctaaattggtaccccatagtgtggaatgttagtaatcattaagggagaatatggttttttttaaccattaacattttaatgtatttcttaccagttttttacttaatacaacaaagctgggattacactgcattacactgttttcatccaggtatttccactatcatattgttagcatcttcccatctcagtaatattcttccaaaccattcttttaagcactatattgaattccaccctatagcaactgtgccataatttgagaatatgattcttatactagtaaatggagggaatggtgacgtagygtccatcagcagggaagtggataagtcgatccagaataagtgttaatgggatgcccaaaaggagcagagcggcccacgacgaatcaccagggatgcctcccagaaacacagccccggacaaggagcgagttataaagtatccacagacacacttaaacaatatatattctaggtttyctttagcatataaaaatcagtttataagaagaactaggatacacttccagctcataatagtggttaccttcaaggagcccagtggggactgaggttggggaaggggtatcagagaggagtgctggccttatccgtgaggttcagatttgttacagagaggatttgtttatgtaaactcctctcggaggaagttctttgccccgtgactcctcctcagagccttcactcgggaccacatggggttccaaggtggtgaatgtgaccaccaaaccctcctccagttttaaacaacagagctgctggtcaccaggttaggaagtgctgtgtaaaagactgtgtggatgtatgtggataatgatcagttttattattttatttatttttattgagatctagtcttgctctgttgcccaggctggagtacagtggtgcagtctcggctcactgcaacctccgcctcctgggttcaagtgattgttgtgcttcagcttcctgagtagctgggattacaggtgtscgccagcacacccggctaatttttgtatttttagtagagaaggggtcttgccttattggccaggctggtctcaaactcttgacctcaagcgatccacctgcctcagcctcccaaagtgctgggattacagacgtgagccaccatgcccagcagtgatcacttctaaaaaacacacacacagggacagggcaagaggagaggagagactttacttactccctgagtttgcccacaggttgctcttcatggagcctgctgctgcagctggcactgtgcttgtgttctcctgagccttctgcctcctggtccctgtgcctgctctgcagtcactccttgttctgcatatgcgtacagatccctccaggccaagcctctcatggacccttcctcccaagcctgcagtcatcttgtgctctgccctccccatcatctccatactcatcctcttgcyctgctctttctggagactctcatcccacttccctcctgggcctgcccaagtggtcttttcaccctgtcatccagccacagtgtctactgaagcccgccgctcctggaattgccaggcagctcttgcrtgctctcttgctgttcatgtgttgctctgttgtgactctagttaaagtgtgtgctttttaatggcaggaactctgtgttctattctttattatgtttctgagattccagcacagtgacttataccagggagacgccaggaagatcttgctgggttttagactgtgtctccctgcaaggactttattcatttggtgcaaggggaggtttactgcatgtatcaactaggatattggtttgactgctttaactgaaaccaaataacagtggcttaagcataatgggcagtttatttctctgtcatgtacaagtctgagctgtggttgatgtgggagaggcattgcgttctgaggatcatccaggacccaggtcccttccatcttgtgcctctgccatttcttaagggttatcctcaactgcatggccagagctggctcacagcactcacctgttctagccgtgcagattggggaggcctcacctgtcactgggcaggtctgggttacactgaccacaccttcctggggagtgggagctttacctgccaaaccccagrggctgccttgccagagagcagaggagaatggagatggggcaggggaagcaggcgtcgacccacgaggaaaaatcagagcagaaggaagctctgggatgagtggttgagaccagctgcctctggtgttcacagagggcatggggggtgctcatgctggactccaggggtgacgatgcccggttgtgcctgggacacgagattttcagtgctgaagctgggggagtcccaggcaaaccagagtgggcgaggtcagggagcggggttccccagccccactcaggtcctccactccaagctgggtccgtgacgctgctgctctctctccctcagattcggtgagcctggcctatcagcgggtccagaaggtggactgcaccgctctgaggcctgtcctgattctggggcctttgctggacgtggtgaaggagatgctggtgaatgaggctcctggcaagttctgcagatgtccccttggtaaggggcacggggcaccctctgtgcctactgggctctttgtctctatgtccctgtccacctgcctgcccagctgtgcacagtgggtggcagtaccggggggcagatttcacagtgttccagaagcctgctgacatgggtcagattcatgcatggcaggactgggttactgacagctgmtgagcagtgttcttcccctgctccctctgctggggctcagcagggcctggggctccctgattcctgtgtctgtgcattgcagaggtgatgaaggcctcccagcaggccattgagcggggtgtcaaagattgcctgtttgtcgactataagcggagaagcggccatttcgatgtgaccactgtggcgtcaataaaggagatcacagaaaaggtacccagggcttcagtctgaggattaggcatccagtattagacctcctgtgcacaggtctaggcccctggtccgtgatcctctgccccagcggctcagaccttcagtgagcccaccgtgttgtgttagtctgagttcacctgtgcctgggcttgccctcatggctgctgtgtgtttctgcaagcacatcccttggtggggatggaggagttcccctgtgtatgtgccgccccatcttcctctctggcaggtgcggggggtctcatctctgatgagagtattgagctctgcggaaaggcctctcgcagggcattcyggaacggggtccccaaatgcatgtgccgaacaatttcacatgcaccttctggggacaggaacgtgccttccctcagggtccctgcccctaaaagggctatgactctcggtgccttcgaacatcctaggcagcacgagggcggggacgtctgtggggagtgctggtggggcaaacactcggagtccaaggacacagccgctccttgggctccatttctccaggctgctcagctcgctcgctgggctttgcttcccttctctgttagatgaaggtgttggcttctcactgctgaaagtgggcaaactctacttgggggaatgccccagtggagcatctgggggtcgggagtgcacgggcctgcactccacctggatgcctgggaygacagacatgacagacatatttcagtctcagccacacaaaggctcaccagactctggctcttcattcgctcagtctggcaaaaataaggcttcagaggccagggtggggcagggctttcagaaggtccctgtatctgggcaaaggcgggaaaggaagtttggagttgggctggccagcacccctagccccctaagccctggctcccagccttggccttcctcacagcaagtggggtttgttgggagtttcgtgggtatggtttccccacggtgtactgtgtggctttactgccttgtttgtgggtagagccctgtgaggtgaggtgggtcctgctggtggcaggacagggggctggctgcccctcactgcccgccagggctcactctgcaccccccaccccagaaccgacactgcctcctggacattgctccgcacgctattgagcggctccaccacatgcacatctaccccattgtcatcttcatccactacaagagcgccaagcacatcaagtaggtaactggccccctgggctccgctggggccttgtcacaggtggggctgggagcccaagtagggagcagggtgtgttggggtggggggttgaggaatgagagatgggcctatgggtcttgaaataggcagtacgtgtagaaaatgacccttccctgtcggccctgtcccctactcagaggtggtgtcagccaagcgcagccccttcctcgcgcccctccgccatttgggtgctgccactgttttttgggcatggccagcttggtctgcacagctcccctctcctgccccagccccctttcctcgctacgtgctgcttaggagcaggggagccagtggcctgggcacagtcccactcagccccgagctggctcatgactcaggagccgttgccttcgctgagcttcggctcytgtgctggttgggccaagggctcaccaaggccctgctccattttgcctttctgtgctgctgagcttctgggacctgcgctaggggctgctggtgcatctgttccaagtgtgtgtgctggggggccctccttcccccatctgcccagagctcccccgacagcctacaggctgttgctgtgctttatgtggggagcacatggggcctccctccacagcctacccctgccttgatggggcccctgttagcctggacagaggaaggaaagagggcctggaggaggctcagtgctcagcctggtgtctggctgtccccacagggagcagagagaccccatctacctgagggacaaggtgactcagaggcattccaaagagcartttgaggcggcgcagaagcttgagcaggagtacagcaggtacttcacaggtaggtgtgcgtgggcctggagtggggagcaggcagcagggaaggaagcagaggcttcctaaggctgttttcttagcygtggagaagcccgcrctttctacatgctcccaagtgctgtcatgagcacgttcctgacaagtcaggtgttcagattgcagtccctggccaacgtcaggattcttacaggttgaatgttaagctcacygatcttggcctcaggtcctgcctggcttgcctgctcattttcacacgtgcagtggtgggtctgtctcatagcacaggtgcagtttagtgcagccacagtgtccccaggcagggcggggactggagcagcccccagtgtgccagcagtgtgggcagcggaggctaggggcccatctgtccctagcaccctccagggcagtcccgttttgcagcgggatttggcaaacccccctccaaaaaaaaaaaacaaaaaacaaaacaaaaaaaaacaatgctgtccccttaccatctctggtcttcaaagtgaaacaaactcagtgaagtktggttctattttaccttctggccttcagcctctttgggaaagtctgtcatttgcagggcattagcatttgcagtcacagaggatgggacagggattctaactgcattgtggagagtgttatgatctagtccagggacctgggcttggtgcccatgtgtgtgtaggtatgtgcaggtgtgcatgcctctgtgtgtgtgtgtgtgtgggtgtgtgtgtgaactttcatttccaattcctcacagactggtatttagccaaatacactgacaattcctagagagatgaaaatttaaaactctaagtcttgcaaaaggtaagctctatttttttcttgttagattcaacagacataaaattacgacgtcctgtttccatagcagtttctagacactcactgtcaatttctgagcatgccttgttgcagtaggggcttggtttgtgtccaggtgctgttatgtggagcacactggagtacccctggcctggtgtctatagacccctttgtcaaactcctatagtacagggctggcccaagttggcgycatcatctttctgtgaytctcctcttggccatgagctatctggctccttaaacttgtcgtttcctgcagaatcctgctaatgattagaccaccgccacatgtcctccaaacttccttctgatgccctgggattcccccaaccattgcaaacccaacccagggtgttaactgcagtggggtgggcagtttacatatgagtgatcaactcaagaggggcaattttctttcccagtttcttgctggtgaaggagagtcaggtggggatggagcagagtgccaaggagcacaaagcagacagccacacagtagaaagagtgcaagctgtactgccttgcctcaaacctggggtcttactctgagctgaatgacgtgtctggggggctcttttgcaggggtcatccagggaggagccctgtcaagcatttgcactcagatcttggcaatggtcaatcaagaacaaaataaagtcctgtggattccagcctgcccgctctaggagaatgctgtgctgtggatgactgcagctggccgcctgaggggacrccagactcagctcttttctagcgactgaaagtagaagtctgtcygtctatgaacatgcrggggaaggatccggaaccaggacccagaagcacctcctttgtagacagagggccacggctgcgtgcgatccaggcccaggmccacacactctgcccgtgtcacacgtgtgctttaacacaaaacagataacactaaagacgggttcagcacccacctttctttagccagctgatcagagatgctgcaaagagaacctttcggatcactcgtttacaagccttttctaagtatttggtggtttatgtttacttgaacggctccatgttgccggtgcccagcccctgtcccctctgtcaaccccctgtcgctttggtgttggtttcgttcccgtcttcagcaaaacgaccttggaacctcaatgggggctgctttgctttgggaggttcttgttggtgggaccagagctttgacaaacctcctgctccttggtggcacctctcctggaaggacrtcacaactccaggtgctcagactgcctgtggcagcagaaccagtgcctttggcattttcctcccacaatggggaaggtgactttggcattcttacaaactcgtctctcggcctttctctcctgccttccacagcctctcgtttctcctccatctgtgcttattacttgaggactgtgtctgctccgtgagagctgcgtgggcagggctgcagtggggtccaggtggtgttcagctgtgctgatgcctgccattgggtcctccttaggctctgtaagtcgtgacagccttcatcagtgcaatgtttgcagggtaattcttaaactttttagagggtggcaggtacatcagttctttttgatatgaaaacattcatgtttcagacattgaattgagagcttttaggggaagcataatggttattgtcactatcaacagtctaaaaagaaaaactgaggtctttttaatcttgattacagcactcacggcatgcaccctactcagtgtgggtgtcttcgtttgggggctttttttttttttgcacttctgaggctagatatgtctggctgaagatttgatgtggttcctccttaagctatgcgtcctgttaataataggtactgtactgggctctgtgtaagtgtcgttggggtaggacctatattttaatactgttcctaacatttcattttactagcgagaaatctttgatttcattttattctttgtaattctagacactagattgtagtttagccataactgatgttttttaaaaagggatatattttcttgcacagttgttcaaaaaagagacaagtttcagtcctcaatgctgtcctttgttttacaggtacaagttttctagctcagacaaactatgaaaaactgtagactattctcaaggtattaactcgcagaccctctgggggtaggggctgttttytaagttacaggcagagtgggactgagatggtacagtgtgcacaracaggtactgagctgacagactggrattttctgtactaaaatgttactttgtatcaaaagttaaacaggctttagtacaacaaataaaggtcaatttctgtaaggctatgtttgaagatgtgagtttttaatctcttcctagtcagtcagctttcctgtatttctaaacttgagacagcttctcctctgcagcacgtagctggagttggctgatgtgtaggttctttctgtctcacatgacaatttgcagtccctgctacccgctgcatcagcctctctctcactccttcctgcccttccctgccacccatctgtccagtgtggcatgaactggtgactgcagccaggctgcccatctgtgtgagacccagattctgccctctggccctcacattcaattctgcaggcttgggaaaagcaaaagggagtgagctgagtgctctgggtagcattctcagtcagggccctgtctggggcccttggctgggaatggccccacctgcttgggggctgctttgtagtacctgacagcatcacactgggagatcacccagcattgctggactcccagaacagcccacgtgggcctgaactccgtgttgcaaggtgatgaggaagttgggaggctgggcctttagctgcaggaagccaggttgaggcctggggcagagcagagccctccttctctgatcctttttcttggaggggcttgggggcagaatgttctccagaagcttcagtcacactccactggtggccaggctggtgggggcagactgatgtggatgcctccctcatcatttcctgctgggtgaagttccactgtggccctgcagtcttgatctcacctgtggccacggggtgtcacagagctgtgcggggctctggtagttggagtgggcccttgtgtccatagggacagggcctgcctctgtctccttgacagcccacaccctgcgccatcctcagaatgggcagcagagccgttgatatattttttttttgagacggagtttcgctctcgttgcccagtctggagtgcagtggcatgctctcagctcactgcagcctctacctgctgggttcaagtgattctcctgccttagcctcctgagtagctgggattacaggcgtgcgccaccacacctggctaattttgtatttttagtagagacggggtttctccatgttggtcaggccggtctcaaactcccgacctcaggtgatctgcctgcctcggcctcccaaagtgctgggattacaggcatgagccaccactcccggcctaacacgatggattttaagtcactgactgggcagatgggggtgtaggggttggggtggtggctgctggttttagggctggtttctttcacagagctcaggtgtgatgccaaaccttcacagttacacttaggccatcgtgattttattttcttctttagatttttctgtaatttccagattttctacaggtaccttggttttcttttataattacaagggggggaaaatcctatgtctttttcaggtggaaggcacttaagtcactgagatcgctctttctggacacacgggccttgcagggcagccccgagacatgctgtcaagcagccctgaaaggatttgtaccctggtgggttagaggcttatttaccccacatggagaccgtgctggggggcggggttgtgggcacagccaaatgggcctcctcctggaggtggtgtctgtctcacactggctcagatcattctggaaaggcagagcagattcttcaactccagccatgagaccaagaaattgaatatgagatgacttctgcggccccttcccatgctaacagctatgattctgtgatatgggtgggcaacaggactcaaatggagcttgactttgctcctggcctagcagagactgtgggaaaccccagcttcaaggcaggaggagacctcatgcttaggcgccgaccctgagcagctctggagtagaagccgagcaccggccagaagcctcaggcctttctttccagccaagacaaagctttgaggctcaacagcagtgggctaaccagaggcttggggaagccgagctgccacctcctgtggggttgatgagacacagggccacaagggtcatgatgtcaaagatgaagagaaacgtgaagtacaggaagggatgcagagtgaacataaaccgcagacaagggtgcacgtgctggcgtgggaacggtggacctctcagcagatgggggctccagggtgggtgggccttctgtactgcccccttctgctacttttctggcctgtgggttccctcacccttctcttgtccgtccatactctttcatttgctctccctttgtagaatatagtctctggcctcctaatggttcccctttagttctccctattactatgtgtttttatctctttttctccccaactgtgaaagatgtcatccatagagaagagcatatccaatataagtgtatagttttgttattaagtagagatgggatcttgctatgttgcccaggctggttttgaactcctgggctcaaacagtcctcccaccctagcctccccaagtgctgggattacaggcatgagccactgtgcctggccataaatgtatagtttaaagagtaaaatggatagtgtttccatctttaaggaacagaacactaccaactaccttagaagcactcatatgtcttcacccggttgaatgccccaccctctctaccaaagtaagtgctagcctgacctgtagtgaataatttccttgctcttcacatactgttcatttttaaaaacattgagcatcaagcacagattagctgtgtggggaaagcacagtgtttccaatgttgaatgaagtctgctggagaacataatgtgatctcaaggtcagagtggacttcagcttctccaagaatttacaaggggcccttctggggaagccagggagcagcaaggcttgaatgagtcctgggcgtagcagggctgccaccatcagggcccgtggccacactatccatggaccagaccctgatcatctggcaagaatgtggatggagggtgccggctgctgagttctgtttttgtagtccccacagctgaccttttgatttcgggaggacgtcaaagccgagcgctgctgtgggatggagtgaggatcttcagctgatctggagggcaggaagcttctccatcatgtcaaggtaagccgagtagaaagaatgtgaatgggatcgcccgggtgacctgtcctcagctgagctgcgggaagcccgcagggatcttggtgctgagggctcctgatgtgtctgtcctgaatccttgctccaggccagaatcactgccctcggggtctggtgccagctctcatcttgacacctctcctctattttgctgagaatctcctgggaatgttgacttcttttgattttcctgtcctcctctccttcgatggatctgtttcctgtgaggaaacacttgaggagaaaggcttagcctcggatctgaattcttaatccacaggagggtcactgggtttatcttctcctatgcatcatcttcttgaacagggctggatgaagtaaaaactagcaaagtctggccgggcgcggtggctcacgcctgtaatcccagcactttgggaggctgaggctggcggatcacaaggtcaggagatcgagactatcctgattaacacggtgcaaccctgtctctactaaaaatccaaaaatttgaccgggtgtggtggcaggcacctatagtcccagctactcgggaggctgaggcaggagaatggcgtgaacctgggaggcggagcttgcagtgagccgagatcgtgcactgcactccagcctgggcaacagagcgagactccatctcagaaacaaaaacaaaaaacaaagaaactagcaaaatctgtgttcatccttgtgtgtggattgatatgtatgggttgggaggctggaggctggggtggacacgcagacccagagagccaaaacagcaagggccgtgagcacctgctgcaggccacttccctgttctttctggagcttcagttatttatgtgttggggatcctggacagttccctcattttctcttctcttctctttttcttttcttttctttttttttttttttttgagacagaatcttattctgtcacccaggctggagtgcagaggtgcaatcatagctcactgtagcctccaactcctgggctcaagcgatcttcccgcctcagcctcccaagtagctaggactacaggtacacgccaccaagcccagccaatttttaaattttttgtagaaatgggtctcactgtgttgtccaggctgatctcaaactcctggcctcatgattctcccatcttggcctcccaaagtgttgggattacaggcgtgagcccctggatctggccagctccctcattttttggttactccagtgtcgttttgtcattttactcttattttgtggcgattcactcaactttcatccttcagtcccttctcttgagtttttcagttttgctaacaagttcttaatttccaagaactcttttatatcttcctgtacttgtttcatgaatacaatatcttatctgaggatagtattttttttcttcatcccacgtaattccatttcctctaaggttgtttttttttttttgtttgtttgtttgtttgtttgtttgtttgtttttgccttggtcttggttttgcacattagaggttttaacttcaggtgtcaggtaatcactgggtgtcgactgatgaagcctgggaaatgtaaaagtccagatcaaatgggtgagagtgcggtcttttgagtcttttgagtttcactgtaggatggtctggctgggctgttcactggggaagcacagcagtgctctctttaggtcttcagagatttgccagattaccccaaggggcccttcctatgtgatgggaaggatcggcctggccgcatcttggagcccagtaggggaagaaggctaggactctttgcactcagcgttcagcatgacagcatatggtcacttcatccttttgttttcagtgtggcgcccattctctggatccatgctggcatcccctagttccaaacctcacttatactctctagagaataacctcctagcttcggccatgttgaggaaaaggctgtagctctgtagtttggaaactaggaatgggtttctcacccagcttttacccattccatacttaagcctcccctccaccccaacttccatggggtaacaacgccacagttctgtgtatttaaagattcttagcattttcttctgctggttttgggtgtggtattctcaggtctgctaaggaatttgccactggtctctctccttttcaacttctaaaatgattttgtggttgttgcccctctgctttccctgtatttctaaattaatgtccttttaaaagaaattcttttactatatttactgttttgtagtaggattttaatagaggagcaaaattaagtttatgtatcaatctgtgatttcttaaccccaaagtaaggtttttctttgctattattttactgtcatttattggagtcttgaatggcctaaaatgtataccttattccttctaacagcagcatccccttctaatttttgggtgtgttggccaggctttaattagagaggaagaaccagtgtatttcatatatatacaaatttgttaaaggaattggcttgcaagattgtgggtgctggctaagcaagtccagaatcagggaggtcatgggcacagaccacaactgttgtctatgggcagtcaggagggaagtgaatgagcagaatggaactccacaggcacaagtacagcagacgccactgcctgtgggtggaatttcttttctttttcagggaagcttcaacttttaaggcctttttaggcttctgcttttaaagcttttcaactgattgaatcgggctcacccagatctttcaggatactcttttttttttttttgagacggagtctcgctctgttgctcaggctggagtgcagagatttggctcactgcaagctctgcctccca

SEQ ID NO: 95074 - DNA, 19920 bp, Homo sapiens
  misc_feature (1)...(19920): n = A,T,C or G
gcagtagctcgatctcagctcactgcaacctctgcctcctgggttcaagcaattcttcctgcctcagcctcccgagtagctgggattacaggcacccaccatgacgcccagttactttttttttttttttgagacagagtctcgctctgtcgcccaggctgcagtgcagtggcgtgatcttggctcactgcaacctccacctcccgggttcaagcgattctcttgcctcagcctcccgagtagctgggattacaggcatgcaccaccatgcccggctaattttgtatttttagtagagatggggtttcttcatgttggtcaggctggtctcgaactcccgacctcaggtgatctgcccgccaaggcctcccaaagtgctgggattacaggcatgagccactgcgcccggcctaatttttgtattttttagtagagagggggtttcaccatggtgcttatcttcatttgaagaaaagacaaatacttgtcatcaagggtggaccataytgatcagaaggtggacaatatggatcacaaggtaagcattgttgaccagaaggagatttattctaatggagcaaggaaaggtatcaatgtgagttagtcagtggaggttaagagggtcaagtcagtagattcatgaaaattgcacagaccaaaacaacagaccaaaaagggaaactgcagaattggaggctgcttgcttccttgcacccacaaggcagagagcccagagctcaggtgaagtctgactgagcagcattttaggcttggcaaagtcttgggccccactcctagacaactggcagtgggatcctctcctgaggataatgatgcattgagaaaagccactgcaaatcagtaaacagtaaataaaggtggcaatggggcatgcaccaaggacgaatctggactggacttggcaaccttgcgggtcctgctgaccaggtacttttctattgactctgggcagggactgtgtaaatgaagtcagtgtgtgtttctatgttacccagctgtactgttgggtgtcgccctgcagggctgagccaatggtagattctctagggtgagaagacccagtcagtgggagagagtgcagatatggattcagccaggcctgggttgaaatccagctcagccatctggtgtccatcaggtggggacaacagaccctcccttgcagagttatcatgaggactacataggatcatagatctcaatcactaagcacagtgtcaggctagctggaagaaaacggctgcgtggaggggatgatgtctggcacaagccagctcagaggcaccactcagagcccacctgcccctggagacacagagccaggtgagtcaggaagaattccactctccacttggccctagtgtgaccttgggcacatcattaatctctcttggcctccattcctttatttgtaagacagggacaacaagctccactttgcagggtcaccctgaggctcagaatgacatctacaaagtgcggagcccagcacggaggtattaagtgaggccccgtccccttcccagaggccaacaggatgccatggccagaccctcaggccctcccgctgaggactctctcccagctcctccactctcccaagcttcaatcagtctccctcagaggcatgagacagaaataaccagcccattccacgtctttacaaagacaaggaagtcctgtctcttggaccagttctccctgaccatgcccgtgaggtccttgccaagagctggtgaccaagcttgctgagacagcagatccaggactggctgtgcatggagcaatgggatcttccaggagtcctggctggggtggggtactatgggtatgagttatccactgcacatggcaaatgacccaacacttagtggcttcaaacaacaaacatggattatcttgcagatactcccagaaggcaagctctgctgagttgtgagttgcagggggctgtggccaggcaggttgtgtgagagcccagcagctgagggtgagccacaccctactgagctccaccctaccacactggctccgctctcagtggcccgcagtgatccagatcacacgagtaaaagaccagctggactccagaggagagcttcgccccatcttccccttgtgggtctctctctgatcactgtgcccaccacctccctgggccttagtggaacctcccttctctgcctctgcctccccatcatggtctggttcttagaagccagcagagagaggatgatgaatgtactgactttgcaaaggccacgggggacactccatccccagagagtcccacagcaacccagtagaagggtctggtggctttctgagtcgcggggaacctctctctcagtttcccttcccatgacagatgctatcctggaccccaaacccctcaagcataaccagacagatgaagtccatggcctcatcctacctaaggaccattgtctaggctggcagcacaggttgtatgacccagtgactggcactggtaatgatctcagccttcatgatatttaatattatagaaaccccacctcatgcccacaccggggctaccttcacccccagcccctcctggagggtctctccagaacaactgtaactttgtaccccacgacaaccacagcgttcactcctgccacacacagggctacctgggagaggttcgttcagcagttccagcatcttaggacaccataacctcctgtccctgtctttgtccttctgaatccccagggtgaagctcagggctcagaacacagtaggtgctctgaaaacatgtctgctgagtgaactttgcagaaagggccctggggagagtgaagagagggtctgaccacagtcctggtactgcccagctgtatggcctcgggccactccccatccttctctgagcttcagtcctctcacctgtacagtggaaatcagagcttacaaactatcagcccagagtcctcatctagtttggatacggtgtttacagttcattcggtgtttaattttattttgaaattcatttcaaaaatttgaaaactagatttctataaaacttaaagtcttcagcttttattgaaagatgagaaaacctgggtggcctgtgtggacccatagtcccatatacaataattggctggcctgggcagcagctacctctttacctgggacatccattagctatctggatacagtgccacctcccctcactccctacatacttaccagcttgcaccactcatgtgtatcacctgcctggcccccgcaggcatctgagtttgcaacccctgaatgagattctgagcttagcacaaactgattgttctttggctttgtgaggcctagaggtggtgttacaggatccctaggtgacaaaacccatcagcaccctggataaaaaaccatgtgagctgagtggagagaaacactgctgtttctgaggataacacagtctataaatagcctcagagccaggtgagtgctaacacctgcctgatgtcacctgggcccggagccctcaagggctgggcatgtgttcagctcatggcttagcctatagactatccttcttcctgataccactgagaacagaacaggaagggatgacatcatagctaagcctttggggaaggtaggcttttctctggcttaggaggtagtgatgaygtttgattttccaaagagagtggaaggagtaacatgaatgaaagaagctggttcccagtccagagtcctcagcatggagtctttgcactattcatggctccccagtgctatccaacaatgtcagacctcagccaggccttcagagccctctgtgattgggtccccacaggcctttcagctcatgctcactattaaaaccatctccctagtccctgagctccatagccccctggccaactccaccgtttctatcttactgtgttgtctgcccaggcttatctctcttgcctccccaccctgtcccaaggaccagcttcgtggtgagagtgagaagggtttgacatgcaataaccctgattgtgaagtcagacagactggtcccagttccaacagcctgcccttgggcaattcactccccagcccctggggcctggcttccccatctgcaaaacagagctgtctctcaggcagagttcacagctgggaaagggttctgagaactgaagtggtcaagtgaatgaaggcagcactcccctggggtggggatgctcatgcttcatcaggatggggcataaactgagtccccccaggagcaggcttgagaaacaacagggtacgctgagctacctgctgtggctgaaggtcctgtgagctcagggcctggaactggccgcagggaagcctggggccttaaggaagcttcatgacaaggcacatggcgtgattcctccactctcaaatccacaggatgcactggtagaggaaggtctgggacatgtgctgagggctcaagtgggctccccactcaggcctgctcacctcagggcacaatcataagaaaggaggggctgctccccagggcagagtgaggccccattctgggctgggacctggaatgcatcccacctgggcttcactgggtgcctaggcccctcctaggccaggaatcggagaagggggctatgaacttccagaagccaagctagccaaacttccagaggccaagctagcattcttatgaagctagggcactgctctgacctcatgaatttgcttggctggcattttgctgcctgacctgttcccatgagcccattcaggatctggggcaggtcagtccagagctggtccctactcctgcccacctgcctccaaggctcagccccacccctttctctgacccctcaggcctctaactgagaccgcagctctctgaatcccaaactgtgagaaagacagtccagactctgtccatcacagatgcccacaggcacagtacttagttgacaaatccatgtctctctcgttcattttatcctaagaacagacacgagaaaaaagcaggatgaggagcatgatcgcacccttaccctccagatgggaaactgaggcccagagaggcctggagcactggtgcaagctggtagcaatactccagggctccctagccctagccagtgccttcctgtgtccaggcctcagcttcccctggggacagtacaagtgttgggccagatgctctctcaggtccctgcgtggcatccatttattgcagacctcccaccaccttgcagtgagggtggctctggctgctgggaagcccactttcagcacgtggggtttaaatgctcctgctgtgggtctccccactgagtcccctcccagggtgcatgctgatgggagggggcagctggcagtctgccccggggctgtcagtgtgggtcctaggaggagggatcagacccagtcctggggagggctgggggcctgaaaggagcatgatgagcccaggctgcgttttcagtcttgctagaagcaggtctggtccccagaaacaactagagacaggcccaggccgggacaagcaggctagggggcatcatgggaggtgtctcagcttatctcctccctcttgcgcctctagctcactaatcccgcctctcatctcacctttctctaaccctctcagactgcaggacctagggcagcagggaagcttatttggcctgagccttacctgcaaagggctcaaaggtagacttttgctattatattcaaattgcaacgtatagatgctcatattttggaattaattacgttttagcagtttttctttttttaaaaaaatctgctggtaccttaataaacatggaaccagcaaccttttgccaggtgtctgttctccgggtctctgggcctggaggcgggagtgtttcaaagcacttcacgctccgcggccccaccggctggctgcgctgcccgctgcggccggcaggggtagtccacggacaggcctggaggaggcgggacgggggcagggccgggaacctgggcaagccaataaaggctgcggcgcgcggctgcgcgggactcggccttctgggcgcgcgcgacgtcagtttgagttctgtgttctcyccgcccgtgtcccgcccgaccsgcgcccgcgatgctggcgctgcgctgcggctcccgctggctcggcctgctctccgtcccgcgctccgtgccgctgcgcctccccgcggcccgcgcctgcagcaagggctccggcgacccgtcctcttcctcctcctccgggaacccgctcgtgtacctggaygtggacgccaacgggaagccgctcggccgcgtggtgctggaggtgagaccgctcgcagggccggcctgggcgcgggacacgggcccggggagagccctgggccccgggcggcgcggtgccgggcgcgctgggtgaccttgggcctccccatgccgagctctgggcctcagtttccccatttctgagaatgggcgtcagaatgatttcttccggcctccctcggagcactggagcgggggagacgggagggagggcacgtgtggaggagaaagctcaaggtcagatcgcagagagggagggctcagcacctctgggccggcccgggcacgagggaggggctccaggagccttctggggctgagcctagatccggagctccgaggtgggtgtcgggggtcttggggtgagcgtcgtggcccagcgggtgctcacgtggcggcccttgcacaacacggagcgcttcctggctccggccccgcccctgcggtcgggctcacactgggggtgctgggaaatggagcgagaggtggtttccagcagtagtgcgggcccagtaggcctcaggccccggccacctggtggaccccagaatgcccctcctgcgagtcgggacacactcagagacagtgtgcccggcgcctcaacccctgccactgtccttgggggccacactgagcacctcccctaactctgtttttgggtcttttctaaagcaaagtaagaaacagtcaccagggtagctttagagggaaagccctagtggagccttcaggtcggccacacattgacagcaggggtctgtttgtgttgactggcccgtatcccagggagcccttagtatttcttcttcattctcagtttcttctggaaaatagggacacccttcctgcttccatttggttccagggtgggtcttgcagcttcgagggtagaggctggctgggatggggcttcagccttccctccccayaccctcatgcctctccctgggcctcagtttcccaaccccgaatggaggagctggyctggcttctaccttagacacactctcttgtccctgaatttctgatgctttgggcccagctgtgggagcactgccagctgtgtccacagaagtaggccaagatagcattgtcatctcttctgacagattaggaaaccaaggccacctcctccagccttgggttcaggaaacggctcccagaaatgatagagctgcctcccatgggggttggcaataatgggaatggaatgtccacgtgcttcttccttagcctccttggccactgtgggggtgggtgggtgctgagagacacccaccttcacctgcctctccaatgaccatcctcttttgtccttcttctcccccaacagctgaaggcagatgtcgtcccaaagacagctggtaagacagggcctgggrccttctgagatgggtctagagggaagggggccaggcagggcaaggtgggtggcstgatgagaagagtcrgggctcrgagacccctgacagatgggagctccatgtgtggctcagccattgggtgctctggggcagccctgccatccctctctgggcctcaacgttggctctgccctcctctctcatagtagctgggagcctcagagccagtggaaggcacatgtaaatttcccggagacttcyccactcctggtgcccagtgaggcagggtgatgggcacacagcccttgagtccgtgccctgctggccagcacagccatgagcctgtactcttgtcacagtgctcaggtactgaggacagggaaggggagtgacttgtccagttacatagcgagttgggcagagcagacccaagaggtgggccagagtctttatccccctgttcactgctggggatgtagcagggattttggctggaacgggtatgaccctggaattggggcctggccctgttgacctgtgtttctcttcgaccctcagagaacttcagagccctgtgcactggtgagaagggcttyggctacaaaggctccaccttccacagggtgatcccttccttcatgtgccaggtaatgtagtttcctcttctgtaagsggggatgagagcagsagctgccttgtgggtgtgtgaagatgcctggtatgaggarggtgctgagcagagcagctgcagttgctctgtcagccaggctgccctccctgcattagccctgtatccaggcttcactgcacatggaagcccagccccaacccgctgccactccaggycagtggcaggccctgcccgggggactgggaggtggagtctatcaagagagagctgggttgggagatggatgtgctgggggtggccttgaagactttgaagagccagcatattccagtggtctctgaccttgtcccctgtgtgcccctgagcactgstgtgggagataagagagggagagagagaagtggaggaggcggaggaggaagacaggtccagggcaggaacacacacgccaggacttggggcttcccttcccagagaaaggcattattctcggtgaaatgaatgtttttcggtcatgtgtcatgctcagttttcacaagcattggtattgctgtgtcagaggtttgggggtaggtgttgtagcaggagcttcctgtgggtcaggacccaggtggtgttggggctggtcttctattagcacagaccttcaagatcagggattgggtgtcctgggcaggcagagcctggaggcaggggcatggctgtcatgacctctttgaagaccttcctgcctggaattctctccccattccctccaccctgacccagtggccgtcatcgtaccgtggtaagtggcagcgggttgggactggaygtctatgtgcggcgaagcctggatacggggtgaacacagggacggcaggcctggcccagccctaaggctgatggtaaagtaggagctgaggtggaagtcctgagccaggstgggaactccagcgcgggagggctccctggcacaaggcggtggcaccgggagtccagaccagagtcctgagtcatccgttgggagggatatcaattagggagcacctaattgacacctgtggatgcttcagctgggctggtcagttcccctctcttacccacggatcccatctcaggaaaacagcagccagccatggcctgggctgggcagcgctaggcataggggctgctaccaggctcttctggccatgggtgccccatgcaggtttggccacggctgcctgggccttagctgaggcctgaggaaagatgtcagccttgggcagactctgtcctgggtctgcaagggttgggaaagctgctgggctgggtaaggggcagtgcgcggacagtgaggggactcggcctggggagctggtctggaccagctgctggtactcccacagactagactcgggaactggggggcctctggcctcttccttgttgccctccaggaggagtgggttaaattctgggtcactaagtatcatctcagaatggcctttaggtcttttgaagattacttaaaaatttgctcagacaaaaagtaagtcatttggaaacaaaggtagttackgtgacaaaagatatttaagttttgtcttttttttttttgcttattattcttattattagctcttattttattggatgtttattgacccctttacctgaggggcrccaactgggtgggcttgggtgggctgaggctgctgccagcgccagggccgtggcccccrcctgctccatggtagccactcagaaggtgctttgtgctcacaggcgggcgacttcaccaaccacaatggcacaggcgggaagtccatctacggaagccgctttcctgacgagaactttacactgaagcacgtggggccaggtgagtgggggcctcctctagggtgagtgtccccacagctctgacctggcctggaagccccagcaggccctgagaggccacatgcagtcaccgtccagtatctgatgagtctccttcctccctgcgacactgtaggctgtctcagcatttctggcttgttgagtttccctagagttttctcatctctcagtttaaaaagcagggtttcctttgggaactttgtggaagaacctttaagcagaatggaggccctggccacctccctgtttgtcctctgagtttcgggttggaaattctaggacacttagaattgttgcagaatggtccttaggtcctttgaggattatttaaaatcttgcttagataaaaagcaaatggtttggaagccagagtggttattgtggcagcatcgtgtcacctataagacccaaggtagaatgtggagatgtctggaggtcaggtcctggggtcctgccccaggtcccgccccagctctaccactgagagcttccacaaggccctgtcctctcaggccaccccactgagaactagcaggcagcaaaggcaggcataccctggggggctggtatcgggccctggttctcctcttctgggtcccaggatctgcagactcgaatgtccctggtgtggtttgcaccgtctgccctttcaaatgccctcccangcaggtgcctccaggggcagcgtggctcagccctgctggtttttgcaggtgtcctgtccatggctaatgctggtcctaacaccaacggctcccagttcttcatctgcaccataaagacagactggtgagttccctgccccaggccctctgggaatgcgggcagccttgcagctggaggaggattcgtgcacttttaggggcaggcagtttacagccaggccttctgctctgggacagtggccctctcccaggctgtgtgtttgtatgagaaagagaaagttagtggaaggatcaagggagaattggggttgttcctgcaactctgtcatggttcgggttcccattgttgctgtcacctggaattttctgagtgtgttctgctcacacgcacacacgaaagggtttctctaccagatacatttgggaaatgttgcaaaacatattatgaggcctcaggagggactgagtagaagcccacttgtgtggttttaacctggagtttcccaggcttgtcttgaccatgggctgagccttggcaatgctgcagcagacatttggatatcagcaaatttccaaatgaagcctctgtattatcataaacctgcagatagccacaggcctgtaagggccctgttttcaatgcccatggattttagggatgtctctttcctggtacattttcctctaagggataaatttctctggccagagtcccaaatgtcctagccctggggcacctggggatgaactggctgggagctgacttggtaaagcccatttccgaggattttagggagacctaggtggggcagacactagaagtgtccagcctccaagcccaagagatgtggccggcagggctgggcaggtccttgctggctcagcctgctctttgctccttcatgggaccccagtggatcctgcagttctgctcttggctggaaccacgccagcttcgctggagctggactgagccgccttttacattattggactctctcgggttgagagctgcccaggactcctgcagtttcaccacccttgttcctttgactcttgactcatcattcatgaccgttaacgtggttccatttgtatggacttcttctttcttcagagcatttcagtatcctgttacctccccatgcagaacaaagaatactccacttttgatagatggggttaccaggattcaggctacatggcctgaggcaaggtcacaacatgagtgacagaatgtgtcctggaagccaggcatcctctggggtgtatttggggcgctcaacaaggcttgatcgagctttgggggtagatctagctattccwtggggattcttttcagaattgctgttttcggtaactaattccatgaccaggtccatggcattggatgacattgcgstacactgttgctcacccgggtcacccgtcctcacaggttggatggcaagcatgttgtgttcggtcacgtcaaagagggcatggacgtcgtgaagaaaatagaatctttyggctctaagagtgggaggacatccaagaagattgtcatcacagactgtggccagttgagctaatctgtggccagggtgctggcatggtggcagctgcaaatgtccatgcacccaggtggccgcgttgggctgtcagccaaggtgcctgaaacgatacgtgtgcccactcyactgtcacagtgtgcctgaggaaggctgctagggatgttagacctcggccaggacccaccacattgcttcctaatacccacccttcctcacgacctcatttctgggcatytttgtggacatgatgtcacccaccccttgtcaagcattgcctgtgattgcccagcccagattcatctgtgccttggacatggtgatggtgatgggttgccatccaagtgaaagtcttttccttgaccaagggggacagtcagttttgcaaaaggactctaatacctgtttaatattgtcttcctaattgggataatttaattaacaagattgactagaagtgaaactgcaacactaacttccccrtgctgtggtgtgacctgagttggtgacacaggccacagaccccagagcttggcttttgaaacacaactcagggcttttgtgaaggttcccccgctgagatctttcctcctggttactgtgaagcctgttggtttgctgctgtcgtttttgaggagggcccatgggggtaggagcagttgaacctgggaacaaacctcacttgagctgtgcctagacaatgtgaattcctgtgttgctaacagaagtggcctgtaagctcctgtgctccggagggaagcatttcctggtaggctttgatttttctgtgtgttaaagaaattcaatctactcatgatgtgttatgcataaaacatttytggaacatggatttgtgttcaccttaaatgtgaaaataaatcctattttctatggaagactggtacctggtttctggaagaggggtctgtgacttggagctgatctttactgagctcgccgtggcagatgccatgctcaggacgttcatgtggatggtttcatgtcatcgtgctggcaacttgtcctccctgccttagagatgaggctcagacaaacgaccttagcacccatagcctatgccatgagcactggctccaccctgaatcccagctcctccccttagtgaccccaagtctgtttccctcagctgcataaggaggcgatatagtttgaatatttgtccccagccaaatctcatgttgaactgtaatccccagtgctggaggtggggcctgstacgaggtgtttggatcatggggacgggtatttcatggcttggtgctgttttcttgatggtgaattattgcaagatacggtcatttaaaattgtgtggcacctccccctgcccccttcttgctcctgctttcaccatgtgacatgyctgatcccccttcaccttttgccatggtcataagcttcctgaggsctccctggaagctgagcagatgccagcaccatgcttcctgtacatcctgcagaaccataagccaattaaacctttttaataataaattactcagtctcaagtatttttttatagcaatacaagaatcctaacacgggttaacaataaggcccacctcgtagggtggtgatccacgtgaagtgcataacgcagtgtctggcgcaccttcctaagcactctggagtgacaaggatgatgacctttcccctgtcagggtcttaggaaggaggagggatgccagagcaaaggagcctccatcatctgaggttaggagtggacttcctaggataagccagttccatttggaattgacttctaggtgtttccaaattcacagggaaggcaggattggaggtaagagcttccctaggtagacagggctgtggtgtggcccrgcagttgagtggtcaggcaggcagttctcagaggaaatttgggcccttttgagggcatctaacagaattatttctcactggggttccctgagtgaggttatgtgtagtcttaggttaatggagtcactctgaggtcatggtgactggggtcgggtcatttggagtcatggagagttcccatgaagtcagtttcagtaggacaagtagtcttaaaacaattatcaagagcgttaagagtcctcaaagcagacaaggaggacacaaggagcatgggcccctgaaccccatttgcagtcatagatgccctccatttatattggggttctgtaagggatttcatttgaagaataggatcttgagccaaatcataattagtaatttctcatccagtccaacactttacagatgggtaaactgagaccccaagagggattatgattgtcccatgtgaccctgtgaatcaattggcaaaacgggctagaatccagggtttttggcagtctgcagggatttctgttgggggccttcgagaatgcacaggtgccttgggggacatattgccaaaggttctcaggccacacacattcagagcacaactgatctctgaggtcaaagcccacagcttcactccctctggagtttcctcttttggggcttatgtttagtcattgtgtttccttcttgctgaggagagtgtgtgtgtgtgcacgcgtgtatgtgtgtgtgtctatgtgtgtgtatctccacccagagaagtctaaggtgaggtgagggtgcaccaaacatgcaggaatctcctaaaaaccgagttccctgaaagcagggccgttacctgtgctgctcattccctgagctcccctgcacaaaggctgagcaaaagtcatttttcttgcataaagcaagaacataagtaatatacaaataaaatactggctcggtcctggccagtgagcactcaatacctcatgcataaatgaggcagtgagtcttacacatgcactcatagatgtaatcataagtggtgccatgtacacacgatttttaaaaaaaatctgaaacatcaattttattttctgtgatgtgatagcttttcaaaatgatttcattgaggtatatttacgtacaagaaaagtcacttcaagtgtacacatcaatgacttttgacaaaagcatatactagtaatatctatcaccaaattaagatacagaatgtttccgtctttccagaaagttctctctgtgccccttcccaggcagccactggatcttatccctgtaattttgcctgttctagaactttgtagaaatggtattgagcagggttcactttttcatgtctggcttctccagtgtggcatgtgtgagaatgtgtgaggctctaatatgcttctgggttctaaagaatcttgctccatgaaaaggaatttcttaaaggtttcgtaggtctgggaaggcctaaagcaatgcttctaggaatcacagagtgccagtaaatcatgcagatttctggccatacctgagacgccttttgaatatttgcatctaggaatctgaattttaaaataataattctgagaggtgaagccagctggacatcccttggggaactttcctgtcttacaagaggattgtaaaatgcaccaatcagcgctctgtaaaatgcaccaatcagcactctgtaaaacggaccaatcagcaggattctgaaagtagccattcgtggggaggactgaaaaaaggcactctgataggacagaaatggaacatgggcggggacaaataagggaataaaagttggctatcccaaccagcagccgcaactggctcgggtctctttccgtgttgtggaaactttgtcctttccctcttcacaataaaccttgctaccgctcacttgtgccatctttaagagctgtaacactcaccgtgaagggccgtggctccattctcgaagtcaacgagaccatgaactctccggcaggaagcaattccggagacaaatctgataaagcttaagaatttgagtgtagccacagtgggtaagagtgaaagggaaggtcatggctcaacactagagtcatcatttacttctggaaacattttttactggactttctgggactctagtgtgacaccctccacttttaaaagaagcctcacttaaggagtctgaccgacaagtctcggatgactgggtggggcacatcctattccactcaagctctgtggaggccagtgggcaggggagctcctcgatagcgctggtcaaagtggccagccaggcatggtggctcatgcctgtaatcccagcactttgggaagcagaggtgaacggattgcttgagcccaggggtttcagaccagcctggtcaacatagtgagatcgcatctctacaaaaaaaaaaaaaaaaaaaaaaaaaaaaaaaaaaattaaaacttagctgggcttggtgacatgtgcctgtggtcccagctactcgggaggctgaggtaagaggatcacttgagcccaggagccggaggctgcagtgagccatgatcatgccacgggactgcagtctgggtgacagagcaacacgctgtctcaaaaagagaaaagaaaaagtggctccccctgtctttgcctatgcaggagcctgtgaaggaagaagctcctagaggggtggaggccccagctcttgttttgtcatctaggaggaggggctgccttgggtgggtcttggatggagtgcatttctcagtgagtggattgcggaggccagaagtcagctctatgtccaagattcttcagaatatggcaggtagagaaagtcttgggtccattctgcctcccagatcacccagcctgtagaggctgtccagaattatgctgataacattattgctattctatcatattgtgatcgttaattttatgggtcaattttttttttttgagatggggtctcactctgtcacccatgccggagtgcagtggcacaatcatagcttgctgtaacctcaaactcctaggctcaagcaatccttccacctcagcaccctgagtagctgggactacaggcacgtgccaccatgcttggctatttattttttatttttttaaaagatgcgggtcttgctgtatttcccaggccagtctctcctggccccaagtggtcctcccacttcaaattcctaaaatgttgagattataggtgtcaggcaccacacccagccttatgtgtcaacctaactgggtcacagagtgcttacacattgggtcagacactattctgggtgtgtctgtgagggtgtttctgtctaagattaatatttgcatagctagaccgagtaaagcaggtggttctccctcgtgtgggtggacttcgtccagtcaactgaagacctgaatagaacaaaaggctaagagggaacgcctcctgcctgacggtcctcagctggaacattggtattttctgcctttggactcaaactgaaatgttggctgtctcagggtcttgagcctgccagccttcagactggaacctacattggctcttctggttctcaggccttcagactcggactggacctacaccattggctctcctgggtctccagcccgccaactacaggtggtgggtcttctcagcccccatgatcacatgagccaattccttatgtttttgtatcatatatatcttatgtatatggtataaatatatacacacacacacacacacacacatatatattctactgattctgtttctcttacacatattgtcttttttctatttataaaaccaaaatgcacatgtaaaaattcaaatgttacataattatataatatagagaattagcattgcctacaatcctattacagtaatagttggtataggtttctgcatttgcttagctgcaaagaccaccactcctttcctaacaatgagaagaagttgaataaactacaaaatcgtaacttttcttgagctcaccagaaaggcaaccaaataacctgagtttcaaagaggaacaaagcggccagtcgccgtggctcacgcctgtaatcccagcactttgggaggccaaggtgggcggatcacctgaggtcaggagttggagaccagcctggccaacgtggtgaaaccctgtctctactaaaaataaaaaaaaaatagccgagcatggtggtgcatgcctgtaatctcagctactctggagactgaggcaggagaatcacttgaaccgggaggcggaggttgcaatgagccgagattgcaccactgcactctagcctgggcaacagagtgagactccatctcaaaaaaaaaaaaaaaaaaaagaggaacaaggccctgcaaggagagacaggacacacagtttcacctgtggcagagcactgtaggaagatatgaccatgaaacaactgtgtaaaataaaataaaattaggtaagccttttaatgaattgctaaaggccaagagggggctaatgtgtccatctggagtagctggggaccccagatgcaaagggagttcaacatctttctccaggctcccaccagatgcacagaagacctaagaggtagcccaacttggtggttcaggtctgcaggaggggaccttcagctgctggagaaaggcacggagcctcgtccacttcctcaggttcttctctccaatgaagtaaatttgagaatccactgggaggttgggcattacaccatccacccccaggaacatgtaaaagtgcactgtggctgggggaagtagaacacacatccttttatccctgtgggaggggtaagaagccatccagggcccaggatcctttagcgataccaaccagaaattgactacctctggtggaagagggagcaagaaacagccaagacatgcctaagactaaggcgggatgaggacagcagaaaagcctcctgccttactatgagcctggtctaccagtgggggagggcggggcatggagagagacaccctccgtattgcagaaagctgagtgtggagtctaaacaatcctttggcaccccagctccactgtaagcacaagtcaacagtaatccaccacttaaggaatttgaagcctatggagctctgaaagcaagaatagcaacacaaaccccaaatccagctcaacccctgaggcgactaactcaatttcccacaataatggcctgaaagaatcagtggcatgcctgtttccagtgtacatactgtattagtcagggttcttcagagaactagaaccaattggatgtgtatatatgtataggcagagggagagagagagattgagagattttaattaattggctcatgcagttgtgggacctgggcaattccaaattctgcaggacaggccagcaggctggtgactcagggaagagttgattttggagcttgggttcaagaagcaaaatgccaccttctttggtggaccttagtctttttctcttaaagtcttcaactgattggatgaggcccaccacattatggagggcaatatgctttactcaaagtcactgatttaaattttaatctcatctcaaaaataccttcacagcaacatctagactggtgtgtgaccaaatatctgagtaccctggcctagccaagttgacacataaaattaataatgacacatactgttcact

SEQ ID NO: 95075 - DNA, 72831 bp, Homo sapiens
aaaaaaaaaaaagaacacttcaagttttctgtctatacttagactctcttaagtaaagcagcaccaaatattatttttttttccccaagggatctgcctttttaaaaatttttaaattttttcttttttcactggttgtagcaacaataaaatctaggggaacttgctagaattaaaatattgcttttgtataaagacatttttgtcattaataatggccaatacttatttttcaaattgtatatgtctaatactgttgctctctcaaactctcacaataagcctatgacaaagactctatatataatactcattttacagaggaggaaccaggcttaaagaaattaagaaacttgcccattgacaacaaagataattgatggagccaggccatgaacccagacagtgaaactgaaggttgtttctttaccaccgcatgacatggctgttaggttttttctacatttttccttttgttgcgctacttttggtttcatttctaagaaatccaattgcctaactcaaggtcttgaagatttatgcctatattttcttccaagagtttaataattttacctcttacattctgattttcttttgttttattttttagagataagatctcgctatgttgccccggctggcctcaaactcctgggctcaagacttctccagcctcagcctccagcatagctgggaccacaggtggctgttactgcacctacccgatgagtttatttttgtatatgttgtgagatagaggttcaacttcttccttttgtatgtagatatccagtcgtcctagtatcatttgttgaaaagagtcttctttccccattaaattgtcttggcatccttgtcaaaaatcaatcaaacataaatgtaaggattaatacacttgtgtgatatatttgattacattccctcacattcattgagttctttacctcaggaaccctaattatccttacactggatcatctttgtcttctctaatagctttcatgtttgtcttttgttctgtattcactctcacgtctttccttatgtcagcaattacagtttcagcagtatctactttgtacatggttctttctaattgattctataataatgatggtcctcaatttattttgttgatccatagctcccctttcaattctattattttggcttttgtcttattaaattcatgatttttgtttgtttgtctgttttttttagactgagtctcgctctgttgcccaggctggagtgcagtggcgtgatctcagcttactgcaacctctgcctcccaagttcaagccattctcctgcctcagcctcccaagtagctgagattacaggtgcccaccacgctggctaatttttgtatttttaatacagacagcgtttcaccatgtttgccaggctggtctcgaactcctgacctcaggtgatcttcctgcctcaacctcccaaagtgctgggattacaggcatgagccactgcacccagcctgaatttatacttttattgagttagtctctggcatcaaacattcgtgaggaattttcttctgttccatgagatttgctttcttcttagttgcattatttgcctttatgtctcctgcatgccatatgatgttcccccttggttttcttttgttttgtttggctggtgtgtgtttgcacggttgccatgctgtttctctgccccctgcccatgcttgggaggctgtttcctgacactgcgtatctctgatattgttgagacatcttcaggtttttccatgataacagaagcccttttgttttcctgactctgctgcagtctggagcttgaggagctgtgttgcatcccttcttctggggtaatgtggaggcagggacagagttcagcagcgctgaggtgcactttctattagcatccctcttagcatctgcctgttcttctgagatggtattgcagattctctaccagggacacatgtctgttagggtatcctttatgggtacatttaggctttggatggcttattatactcaatatgaggctcttgggccttttttttttttgagatggagtctcgctgtgtcatccaggctggggtgcagtggcgtgatcttggctcactggaacctctgcctcccagattcaaatgattcttctgcctcagcctcctgagtagctgggactacaggtgcctaccatcatgcccggctaatttttgtattttttattagagacggggttccatcacgttggccaggctattcttgaactactgacctcaaatgattcacctgccttggccttccaaagtgctgggattacgggcttgggtcaccatgcccggccaccttttctttgtacctttctaccttgatccaaaatctcctccagagtttgaatttcaagtatagagcctccatcaagttcacttaaatttgcttttttccaattactgttgccaaatacccaatgttagtttgtctattacccttggtgtttggacaaattgaaactgtggttttcttctgctgttataccacaacaacagtcaacacagaagactctgtgaccaaatgggtgggggttttctcccacacaccaagcaggggacatcagctaggtgtcctccctcttatttaattcaattctgattctgcctacctggagatagctgtagatcccacaagttgaaggctcagtccccaacactggcccctcctttccaccactcacaagtctgggcctctggaacttttgattgactggcttcaagttggggtttccacaaccccctctttgggttcaattaatttgctagagtgactcaaagaactcagggaaacacttacgtttaccagtttattatgaaggatattacaaaagatacagatgaaaagatgcatagggtgaggtatggggtaagaggtatggagtttccatgccctccctgggcacaccaccctccaggaacctccacatattcagctgtccaaaacctccctgagccctgccgtctgggccttttatgttcgttgtataggcatgattgaagcatggacagccgtgtcaaggtgtgattgacctctctgtgcagccatgcttcctccagggtatgaggcaggaccctgtttgcaatgagggtttatgatccgtaatcagaaaggcgggagatgattagagtcctgcctttagtgagtggaaggggagcagaaggtgagagagagagagagagagagagagagagattgattctattttctgaggcctaaagtgccccaacattgtaacaaaagactgtgagttatgaaccaggtactatggctgaaaacctacatatacatgtatcatcatatcacacttggcaaacaactctttgtacatttctgtagcactgcagtgttcagtctctgacttggtgtgtctttctcatctgcctctttgttctgctgctgtcctagaaattagagactttaaaaaattccttggctttttggtagaaagaaactcccagactgggtccaagctgaaaatgaatcccttactgggtgaaaaacatggatgcggtaacaattcctggctgtaaatgctcataatattactgttgaaccattttatgctaataaattatctgggacctacttcccttttggtttattcctctttttttctcctgttgctacttataaccatccttgtcaactatctacattttactattaaattattcatataatgttggtgatttcaaagttttcttgtattatttttgggcatttggccgaaaggcactgcctccattttacaagttagcatgtatccagaggccctgtcctgcaacaaaggtgcaggtgcctcagtggcaatacgtgtaagaaaatgttaatttttagggtaaaaatttcattagaaactgtctttgtggaatacaatattagttaatctttacacatgtttttaaaggaagacgaaagattgccactaaaaataaattcgtactgaaagcatctctatctactctctccatttttaaagtacctcacttagtatctttgttttcatttgttaaatgcaaggtcatcctttgaatgttgtcttcaactatgcttgaaatagcttgagacccagcagataattctgaccaggaggtatcagcagacagtgggcagcacagttagaggaaaaaaatgttgcagggccccactcccaataaaaacctacaataaaaaatttaaaaattttaataaagaggaaaatgacaaagaggttttccaaaggatgttcatattctctatttaaaaaccccactgggccgggtacggtggctcaggcctataatcctgagccctggagttcgagaccagctttggcaacatggtgaaaccttatctctaccaaaaatacaaaaattagccagtctcataacccgctcttaaataaatagattaaaatttaaaaataaataaataaataaataaataaataaataaccccactgatatgaacatttcttccattttggagtaaaggtgcctacaaggctaggcaatgtccatatttctttcctgaatgtttccaacggggctgcgcctagagcagatgtatcataaatactaattacttattataatgaccaagctacattgttagcatagaataattccacaggcttccctattggtttgtttgatcctaagcctattaatacctgcttctatgtcagaaaatctacattaggccaggcatggtggctcacacctgtaatcccagcactttgggaggccgaggcaggtggatcacctgaggtcaggagttcgagaccagcctggccaacatggcaaaaccccacctctcctaaaaatacaaaaatttagccgggcatggtggcaggtgcctgtaatcccagctactcaggaggctgaggcaggagaatcgtttgaacccaggaggcggaggatgaagtgagcctcaaaaaaaaaaaaagaaaaaaaatattattttgatacatgttttaaagctcaccttcggcattatgagataatccctcaagtgaggaaaaaggtccatttattaatctcaaagaaaacagttacagcagatgtcactggttaagagttcagttggtgaatagcatttcacaatttgtaccaacatctggggaaagacgctttgcatggaactgtaaaacaattgagcaccaaatctgcacaactgcgtttctagaaaatgcgatgggttttatagagatgaggtcttgctatgttttccaggctggtctcgaactcttggcctcaagcgatcctcccgcctcggtctccccaagcgccgggagtacaggcgtgagccaccgacggaaatggattttaagtgaaagtcctatcttcgtttgcaaatcaatttttccaggatcaaagttctagcaaccataaatcctatccttctagacatagggacccacataagggccacttgatgtgacacttgccccgacagcggtgccacctggcccctaggtggcaggtgcgtttttaactaaacccaagagtctgaagtcacattattctcttgccttgaaagcttaagagttggttcctaatcggtggcttaactcggtctctctccaggcaaggccacctgtttgctgatctttcacagggcgaggggaccggagcccttcaatgcagcgccctcttggcctgaagagggggcgactgggcgcccagaccgcgtctttctcactgagatcccagctcctggacgactgcctcttttcgggttcggctcattccgcaataagtggaggggtcccgcctgatcctaggggccggcgcccttttccttccctccctgcgcttgcgaacccctccgggcgtctccggagccgcgacccctgctggggaccccgggggcgggaggccgaggggcgcggcgagggccgtgacgcgaggcggggccggccaatgggagcgctccgcggcgcaggctgagccgccgggccataaaaaggaggcgcggccgggctttccagcctgtggccgctcccggctcggagtgtgatctaagcaggtygcgtaccttcctcaggtgactccggccacagcccattgtccgcggccaccggcggagtttagccgcagacctcgaagcgccccggggtccttcccgaacggcagcggctgcggcgggtccatsgagaagggccctgtgcgggcaccggcggagaagccgcggggcgccaggtgcagcaatgggttccycgagcgggatccgccgcggcccgggcccagcaggccggcggagaagcccccgcggcccgaggccaagagcgcgyagcccgcggacggctggaagggckagcggccccgcagckaggaggataackagctgaacctccctaaccwggcagccgyctamtcgtccatccygagctcgctggscgagaacccccagysgyaagkgctgctcaagamgccctgragggcggcctcggccatgcagttcttcaccaagggctaccaggagaccatctcaggtcagtgcgcccgcgggctgctagagcgtgcgggcggcgggggcggtgcttgsaggaaacgcgcgccggctccaggaagtttccggagttgcctcacttttggcgcaggaagccgggcgctgtcacctccgaacccgccctagcctgccgccctgccgaggccctgcgtggggcacagtcggggcttcctgggtggcagcgacctctcagccccggaactcgctgcagccgccttccaggggcccttcccgctcccagcgcgcagccctcctagaacgccccgggtgggcgtggacgggagcccggagccctctcgcctgagcgcccagcgcgggattctcggggtacctgcggttccaaacttgcccacgataaggatcacctgggcacttgctgcggcgacggcttcctrggtagttccttattgagatcccattgtcagggtgtgtatctggattgaagcctcggcgcgatccttccccgaaacctcggggacctgcattcccactgatttgccaggggatcggagtcttagagttgtgcttttttttttgtccacctcaagtttactccagttcaggacatttacaaaattcggcacaattttgggcacgggcttccccggagtttgaggtgtgaggttgattgggtgagtttgctgctgaaatctgtttcctccccccacccccaaccccgcaaaaagcagtaaagctactccgggattcggagggctccgtgggttccaggactcagtctcatccccgcaccctcccaccctaaaataaagccgggttgacccggtgctgttagcgtctgaggcgtgtcggcttttcacccagagggtggggatgcaatcagtgtgggtaggatgcaagatggggtgatggagagtggaaaatggggactttgctgcctgttggccagagaagcagtattggtctgtgtttaaaaaaataaagcttctggcttctacagctgggaccaaagacattattttccagtctacaccttccgtgtgtcttggtgacatttatttatttgccctaagaagcattctaccgttcactgttttttgaaagaaaaacagtgcgctggaaaggcaatctccctgccccagttatttctctgaaggagtgtagagcgattccaccaaatagaccctgggaaaaagaaagttattttttgcccagtcttccacaccccaaaggaagggtgggaaatcagaatgtgaaagagacggggccccaaaaggaaatgatgctacactctaaaaccggcagtgacttctagttctgtttccaaattcacttttttttacccctcaattgcaaaagtttggaatctcagaagagatttcaaaatacaaagactgaaaaataaactttcagttttctgtgggatcagctctttggaggtctagggctttaaatttgtgtgtgtgtgtgtgtgtgtgtgtgtgtgtgtgtgtgtgagatatttcacaatgtaatgaaatgtcttcttaaggccttactcattttgccccttgcagacacagaaagtggtttacttcacagcatcggccaggctttgggaatcctcccttaaagagaattcataggacagtgttctgtaatctagcatggatctaattacccaaagagagaggaatttctgaccctgagacaggtcacagaattatctaaagtgactcacagatttacttgagaaatggttagctgaaatatctcatgagcgaagattcatttaaagaggattaataactgcaaagaacacatcattccacattagaaaactgttctggttggccgagctcggtgctcacgcctgtaatcccagcactttgggaggccgaggtgggcggatcacctgaggtcaggagttcaagaccagcccggtcaacatggcgaaaccccgtctctactaaagatacaaaaaaattagccgggtgtgatggcgggcgcctgtagtcccagctactcgggaggctgaggcaggagaatcacttgaacccaggaggaggaggttgcagtgagccgagattgcaccactgcactccagcctggacgacagagggagactctgtctccagaaaaaacaaaaaaaacaaaaaaactgttctggtcaagttttactatttaaaaagtccatgggccgggcgcggtggctcacacctgtaatcccagcactttgggaggccgaggcgggcggatcacctgaggtcaggagttcgagaccagcctggccaacatgggaaaacccattctctaccaaaaatacaaaaattagccgggcatggtgtcaggtgcctgtaatcccagctactcaggaagctgaggtaggagaatcatttgaaccctggaggcggaggttgcagtgagccgagatcgcaccattacactccagcctgggcaacaagaactaaactccatttcaaaaaaaaaaaaagtccatggatgtagagacactgcaagattagtagttgtcagggactggcgagaagagggggatgggtagtgattgtttaatgagtatggagcttcctttggagcttccttttggagtcatgaaaatgttctggaactagagagtggtgatagttgcacaatattgtgaatgccactggattgtaacttcaagatggctaaaaatgaccaattttatatatattttaccacaatataaagacaggttttgtggcgtgcctgcagtcccagctactagggaggctgaggcaggaggatagttgttgctcaggagaacagcctgggcaacgtggggagaccctgtttcagaaaagaaaagtccatggagcggaccatttaagattattattattatgtttattttcatgtttttgagacagggtttggctctgctgcctaggctggagtgcagtggcgcaatctcggctcactgcagtctcactctgctggactcaagtgatcccacctcagcctcctgaatagctggaactacaggcttgtgccaccatgccctgctaatttttgtatttttgatagagacgggtttttgccatgttgcccgggctggtcttgaactcctgagctcaagggatctgcctgccttggcttcccagagtgctaggattacaggtgtgagccaccatacccagcccatttaagattattataagccattaattgaatataatcatgcattacattatgatgtttccttcaatgatggaccacatgtatgaaggtggtttataagattacaatggagctgaaaaattcacattgtctggtgatgtcttggtgatcctgacctgtgtaggcctagagtaatgtgtttgtttgtgtcttagttttttcctctcgtctcccccatgtcttagtttttaacaaaatttaaaaattaagaaaattgggccaggcatggtggctcacacctgtaatcccagcactttgggaggccaaggtgggcggattacttgaggttaggagttagaaagagaccagcctggccaacatgttgaaaccccatctctactaaacatgtaaaaattagccagatgtggtggcgcatacctgtagtcacagctacttggaaggctgaggcaggagaatcacttgaacccagaaggtggaggttgcagtgagccgagattgcaccaatgcactgcagccyggttgacagagtgagactccgtctcaacagtaaataaataaataaaaatwaaaattaaaattaaaaatagaaaaaggtatagaacaaggatataaaatatttttgcacagctgtacaatgtgtttttgttttaagctgtgttattacaaaagagtcaaagttttaaatacattaagctgaaattattgaagaaaaaatatgtttagtgtagcccaagtgtacagtgtttataaagtttacagtagtgtacagtaatgtcctaggccttcacattcacttaccatgcattcactgactcacccagagcaacttccaatcctgcaagctcctttcatggtaagtgccctacmcagacataccatcttaagtcttttctactatatttttactgtaccttttctatgtttagatgtctttctaaaattattattatttgtattttaaatatagaggcagggtctcactgttttgcccaggctggtctcgaactcctgggctcaagtgatcctctcctcttggtctcccaaagtgctgggattacaggcatgagctatcccacctggcctacatatctttaaatacacaaataccattgtgttacagttgcctgcagcattcattacagtaacatgccatacaggtttgtagcctaggaataataggctctaccgtgtagcctaggtgtgtaataggctatctcatctaggtttgtgttagcactctcttccttcagtgtttgcgatatgaaactgcatttctcaggtgtttctcagaatgtatccccattgttaagcaatgcatgaccgtactttttaatgggttaaaagctttacgttggatggtcttggttcatcttccagttttcaagtaaacatttctcttatccccatgacaaggcaactgaggcagagaggttgacacaagtagtagagctggtatttgaatccagagagtctgactgcagaattcttagccacttccttatactgctacagagagaactgaatcagtgtaccctatctgtatatttcaaactgtgaattgggtcaacagcattaaaaaaaaaagtggagtagccgggcgcggtggctcacgcctgtaatcccagcactttgggaggccgaggcgggtggatcacctgaggttgggagttcgagaccaacctgactaacatggagaaaccccttctctactaaaaatacaaaaattagccaggtgtggtggtgcatgcctgtaatcccagctacttgggaggctgaagcaggagaattgcttgaacccaggaggcggaaattgcagtgagccaagattgcaccattgcactccagcctgggcaacaagagcgaaactcagtctcagaaaaaaaaagtgagtagaggttgggcacgggggctcaagtctgtaatcccagcactttgggaggctgaggtgggcaaataacgaggtcaagagatcaagaaccccgtctctactaaaaatacaaaaattagctgggtgtggtggtgcgtgcctgtagtcccagctacttgggaggctgaggcaggagaatcacttgaacccgggaggcggaggttgcagtgagccgagattgtgccactgcactccagcctggcgacagagcaagactccatctcaaaaaaaaaaaaaaaaaacaaaaagtggagtagaatggataagatcagtctatcacatatagtaaggacaagtgttttgagaaacttcttcttttgttttttttttttttgagatgaagtctcactctgtagcccaggctggagtgcagtggcgcgatctgggctcactgcaagctcggtctcccggttcacaccattctcctgcctcagcctcctgagtagctgggattacaggcgcccgctaccacacccggctaattttttttttttgtatttttttagtagagatggggtttcaccgtgttagccaggatggtcttgatctcctgactttgtgatccgcccgcctcggcctcccaaagtgctgggattacaggcgtgagccaccgctcccggccgagaaacttctatgtaggttttataggcataattgtgtgtgtgtgcactggctccagatgtaaaatgcatttcttactgtaggttgtagtcaaaagtttgaaagcctgtatctaggggatctgtttaaggatttaatatttcttttttttttttaaagagatatataattaaagagaagacagagtagtgagaacaaggatgatgctgaacttaaaggaatgaacctgaaatgtggtggggtcttggaccaacctggatggcagggagaaggaaggatactggtgggagataggagtgagtgggaacccacatctttaggtccataaacgcttctgcacaatcccttttatttctttagagagcatgagtcaagtggccactatatattgtttttggataagaacatacttctctgaaggtcacttttctgtgcttgtaaacaggatacaggactttatatcttttatatatctgtattctatatattaactcctggttagtaatgttgacttaagtgttgtaaaatttaaaataagttggtattttacattcttcaaaatccatttttcctcccagtgcctcttgtgtggattgatccaaattcctggcattctggggaatttgttcagttttccctacgttgcagcgtctctccatgactgtctccttgtgcaccttttccctactttccagtgtgtaccttccatgggagcatctgtggtcatctgtgaccagggtggtgtcagggttgtataggtttcctagtactattccctactggactgtagctcatgggctaggagggagggctggaggagacgctatcatctctcccaggaactggctgtcctttgaatctacatcacaagctgatccttggaccagctcagaccagctcgtcttgatctatttctgtgccatttcagtttagctgtatcctagttctcttaaatattcaaggttttatcttggtgagttctcctttctatataaggtacctttcctgtatttccactattcttttattcagaacctacacttagttaaattggagagtctgctattctctgagggccttgatcttcatgcccctgtaactgacccttccaggtatacatgggaacagcctttcagacagcattatctaccaaggattaaatgggtataacttgttccatcagttgttttttatgagtttttgggaatatgcaagagtcttgactctgtcacatttccagttaaagtaggttttagcttgtctgccaagacagtttttataaatcatgttaacagttcaaaattttgggaagcatgcatataatccagcgtgaggagatggcattggagatggctgactgcttcccctgtgagggctgaggaagcacagacactggcagtgagtcatatccccacctcagccattttcactggaagattatgtctattcgctaaagataatgggaggcaattagatactttgtttatacaaaaatgcatcttagacacttcataytgaaatgtagcaatcacaaaaggtttttctttttgaatcacaaacctctcggatttattaaattagactgctgtggtgaactaagaattttaacaacttctaagatgtgaagaggaacaaaaacataaactatttactattctctcctatatcatgggtgaaaggtgagtttatatcccaagttttaaagtatattatagaaatgctcttctcatcattaaaaggtactattttagatgtgtagctcactcaaattttgatccattaataatttttgtgcttggtttgttaatgaacacttatataggacttagttgtgttcattgccagaaagagcactgtgaataaagaagaaaaaataacaaggcacttttgacatattatatgattggaattttggacatgtctaagtggaataaaacagttaagaagttactgagaaagggggagaaaagccaatcctaatagtttcttttaaaaatggattatctataaacaatttttctgacatgggaagaaaaatcaatatacataacttcactatagcaagcaaagccttcaggttggtactcgtactagattcccagggctgctatcacacagtaccgcaaactaggtggtttaaatgacagaaataaacagtctcacagttctagagactaaagttccaaaatcaaggggtcagcagaaccatactcactccagaacctgtagtgggggaggctgtccttgcctcttcccagcttctggtggtggccgtcagttgatggtgttccttggtttgagctgcgtcactccagtcgctgcctctgtcagtgtccatgtttttgttttgtcttataagaatgtcagtcatatgaggcagggtccactttactccagtatgcctgtgttagtttagctaattacatctgcaacaaccctacttccaaataaagtcacatgctaaagatacctggggtttaggacttcaacatatcttttttggcgaatggcacaattcaacttgtattagtactaaatactattattaaaaaaattagtaggaattttactacaatttcattgatcatcaagtactacgcacttcactgaacgctgggaatgcaggatgagcaaaaccaggtatagttcctgccttcatggaacttacagcctagcagatmgaatcacatgaaatagaaatgtgttgtgagattgagaaatgtgatgataaacaaaaacacagctcagtgagagcacttggcataggaacttgaccaatgccaggagatgggagcatgaatgggtgaagcgatgcttaagccgactgatgttctgagtaacaaatactgctgatggcttactttgtgctaaacagtgagtttttacatgtgttacctcatttgatcctcacagtagcacgatggggtaggcaatattattcccattttatacataaggaaattggggcacagagagaactttcccaagactgtatcttgaaagtggcggagctgagaggatgatatagaaagagaatcattgtaatctctggtaggtgatttaattttaataataatattttactgatttatttgaatgatttctcccttcttcctcacctatccccgcttttgtattttctctgctrtttgctttgtccacctctagaaacccttccatgcctgggcattccccacctgactcatttgccwgtgatttctatatgaggactgtaatttgagtctagtatttggttgagtagactgcagtgttaaaactcaccaggagagggcaactgtctaatcattggatcccagattatgaatcctggattatgtgaacaattctcagttccaggttatgcaaacaaatatgtttcccatggttataaatttgctagagtctatagtaattagattgggatataatttgtgttgggttatgcaaagagtatctgaaccaagttaaatctgttatactcaaggccaagaggacattcatttactagaattttattctattggagcccattagtagaaatatttatttatttggaggcagagtcttgctctgtcacccaggctggagtgcggtggcatgatctcagctcactgaaacctctgccgcccaggttcaagcaattaccctgcctcggcctcccgagtagctgggattacaggtgcccaccaccatgctcggctaatttttgtatttttagcagagacagggtttcaccatgttagccaggttggtctccaagtcctaacctcaagtgattggcctgtctcaacctcctagagtgctgggattacaggcatgagccaccgcacccggccggaaacatacaatgtttgtccttcatgtctggcttattttactttgcaaaatgtcttcaaggttcatccacattaaaaacatctattttatttttatttttattttttgagatagagtcttgctcttccgcccaggctggagtgaagtggtgtgatcttggctcactgcaacctctgtcccctgggttcaagcaattctcctgcctcagcctcctgagtagctgggattacaggtgcccaccaccatgcctggctaatttttgtatttttagtagagactgggtttcaccgtgttggccaggctgttcttgaactcctgacctcagatgatccgcccgtttctgcctcccaaagtgttgggattacaggcgtgagccaccacatcagtaattcattctgtacaatgttgtatattctcaacacatattatattttaatttccttatttcaagaaaaccttagaattgaagatacagtagttccccttatccttggggatctgttccaagacccccagtgggtgcctgaaactgagggtagtaccaaactggattgccatcattcagaataaatttctgtttgtgtcttctacccacaaatttcatgccttttccatcttaactaagcacttaccatgtgctgtggccatagcttttgcagtctgaagtacaataacaatactagcatgaatttttttttcctccttcacagtttcacagatagaagatttgttcttaatatagttttagcaacctcagcgtaatgattttgttcattaataaactgagaactttaatctttttcacttgaaggaaacacagcttctctttggcataactgaattgccaacgtcactactcttgtggtttagggccattgttaagtaaaataagggttacttgaaaacaaacactgcaaaactgaaggttgatttgatcactgagatggatactaagtgactattaggtaggaagcatagacaatgtggatgctctggacaaaggattgattcatattctgggcagaagggctggagatttcatcgcaatactcagaatagcgtgcattttaaaacttatgaattgttggctggatgcgatggctcatgcctgcagttccagcactttgggtggccgaggcaggtcactgacttgagctcaggagttagagaccagcctgaccaacatggccaaacctcatttctacaaaatgtacaaaaattaagcaggcatagtggcatgtgcctgtaatcccaggtactcgggaggctgaggcacgagaatcacttgaacccgggaggcggaggttgcagtgaactgggattgcaccactgcattccagcctgggtgacagagggagactctgtttaaaaaaaaaaaaaaaaaaaaaaatgccaggcatgatggctcatgcctgtaatcccagcaccttgggaggccaaggagggcgtatcatttgaggtcaggagttcgagaccaggctggccaacatggtgaaacccccatctctactaaaaatacaaaaaaatttgctgggcatggtggtgcacacctgtaatcccagctgctagggaggctgaggcaggagaattgcttgaacttgggagccgaaggttgcagtgagccgagattgtgccactacactccaacctggatgacagagtgggactctgtctcaaaaagaaaacaaacaaaaaaaccttatgaattgtctatttctggagtttttcatttagtattttcagaccatgtttgaccaagggtaactgaaactgtgaaaagtggaactgtagatggtctctatgagtagtcactgttaaaggggaaacaaagatgattgttggcctgatcttggccttcaaggagtaaaggggttctgtgtagtcagagggaagctgggtgcttctggtggagagacaggaaagtccagatgttatggagaaagtagcttttgagttgaacctagaaggaaattcattttgagtttttttgggttgtttgttttttgcagaaygtgtccatgctggtttagagattatggtctaagtgtttttcaataaaaggcatacactaacattcatagttacctgtaccagagttaaaattaaatggagttttcaaggcaattagatttattttaaacttttaaaagatcaatattaatggcattagggccagctcctttatctgatgtctttaaagttcattctggccatagtcaacccttgtaatgaattttaacctgacacatgttgctacttcatctagtctttgtaacctggttatttatttattttttgagatggagttttgctcttgttgcccaggctggagtgcaatggcgcgatctcgtctcaccgcaacctccacctcccaggttcaagcgattctcctgcctcagccttcccaagtagctgggattataggcatgcgccaccaagcctggctaattttgtgtttttaatagagatggggtttctccgtgtgggtcaggctggtctcgaactcctgacctcaggtgatccgcccacctcggcctcccaaagtgctgggattacaggcgtaagccaccgctcccggcctggttatttgttttatctgcaattattctttctcgtgaatccccttggctaatcatgctcacaaagttctgacacatataccacctgaatatttctagaatctgagtcatctttcacttaaattacaataacctcttaactggccttcttgcctcctagcttgtcctgctctgatccattcatgccaaagtgatttttctaaaattgaataagttttttccttgcaaaaaacacttgattgattttctgttgtctttcctcaccattgctgtgaggttttgttctgttgtagcctcttgctacattttttggcatttttttcttatcttccatcgcatttcctcatatagggcaatttagtattttagtttagtgcatagtttagtgcacagttaatctgagaaaccactctgtctcatttccttgctggagctggagacccaggtgaagatcctgaggtttgttcttttgcaatgtttggcctttattatctgccctcctcctgtaatttattttactgtcctttttgtttttggttggcaaccatggggaggtggctgctgcctcttgcttatcaacaactgttgcttatggagacttctgtgaacaagcagccaggtttaggtgaggaaattggccgtgactgaattctgggtgaatttttcgaggtccagttggtccaaatgtttgtgatgtgcagtcctaagaggccatggctcttcctgtgaagtgtgatgtgttttatgtatcacacattagtttttatttgtcctaagcaggaatcagaactcagttcaatagaggccattggcaaacatcccaaacaaggaatctctcactaaaatagcttaaaatataattttacctgtgtggtctaggcatttgtggtacagtgttcgttagcagtgaggaagggctatgcgtgcctggagatcagatgagaggccttaactcagtgaggtcgctgactagttgactttaaggcatagctgctgtagatcatacccctctaattgaccccaccatttatcgtttatcacatgggcagccctggaggtatgcctctctgatggcctatcaaaaagaatctgcccttcagcttcaaggaacagtttgctgacagcctccagctgttagtgctgtcaggctttgcctccacggaggccatacttatcccatgctgcgtgtcctttcattttggtgtcatctctttctccccttctacccctcctccaccacagtaaacagctttttgagggctggggctgtttacaagtgaagtagtttataaaaagtagatgcacatctttcagcttcatatttagcatgttggaaattctgttcactgatctaattctgaaatctccttggtatttcttaaactagttgtataggctgggtgcagtggctcatgcctgtaatcccagcactttgggaggctgaggtgggcagatcaccaggtcaggagatcgagaccatcttggctaacacgctgaaaccctgtctctactaaaaatacaaaaaaaaaaaaaaaaattagccgggcgtggttgtgggcgcctgtagtcccagctactcgggaggctgaggcaggtgaatggtgtgaacccgggaggcagagcttgcagtgagcggagatcatgccactgcactccagcctgggcgacagagtgagactccatctcaaaaaaaaaaaaaactagtatgtcaacaaagctttgtgctgctgtaatgggaagaacagctagcctgggctagtaatatgctaactggtttatgaacttaggtaggtgagtcacttgactattctgggtctgttctgaagggagaggcagtaggactaggagttaaattgtcatgccgaggtctctgagcatgggtgggcctgtcagaattgtcatcrctcactctgttgacttccagcagctgacaggcaaggccctaggaagctcttcagcctcctttccttgctagaggtgctgttttccctggaaatgttcaagccctgcaaatcgtttctatagtaacaggtctctgtcttttttcttatgatgcagatttttgaaaaggtttcttatctaaatgttcttgggatctatggtcttcctacctgtagctcctttgattagacagagcctttatttaaagacttttccccccaagaatgttgttgttgcttctaccaaaataataaccagttgttagttttactagtgcttgaagttttagtttattaataaagcttcatataaactagaaaaggagtggttgggtagaatagtaataccgaaaaaactaatattcactgttagtctcatgtatttgtaaactttaattttttattatgtaaaaccttcaaacataaaagtagtcaaaattatataatagacacctatatacttaccacctagattgaaaactaacattctgccatattggcgtagtttattcgtttactgatagtaaatcagagacatgtatttagaggtgaaatgtcaccctaaaaagcgtttttcttaatgatttacaccacccttagtaaaattagctattcattccttcatatcatctaatacctaatatatattcacatttcctcaggtgtctcaaatgtcttttactaatgattttttccaacaaggatccactcaaggtccatacatttgcatttgattattacgttttaatctggaatagcgcctaccgcccccaacccctgccactgctttatcagagaggtcagttgtcctgtaagatactctacctttatgatttgtatgatttttgtttgtttgttttcatttaacttctatatttctcatattcctggtaactgcaagtcaggtctaaagacctcactaaattcctggaaaacatttttagcaggaatgctctgtacttcatgcactgtcacaactgggagacactaagtatttggatcttgaagatttaaagacttctaattggtttttaaaagccctgtttcactggttttctaggataagcttctctagagaagttcctttttaaaaaatgttttattagtttgaagatttaatgggattttcctttcccctgaaattcttccagtttgatttcaaaaagaaaaggtcaacatagcattacatttctgaattttccctcaaataagccaaataaatagttggtgaaacagtattttgtgactgatgcgcaccactttggttctggcagtctctgggcattaggccactctttctgctctgctctcctggctgacagtttataatggattttacttttcttttaaaaaatcagatttgctgtcttttgctgtcatcagctctgggccttgtcaccacatggcagacttcaacctacaataacccctgatgcgtgtttcctgaaggggacctctccccttcagtccacacttctagtaggttgagttcagcccaagattaaggctctggtctggagtcagaagatgggtcaaaatctagctctcccaccggctggttggctcttcttcagcagtcagctagtgtttccaaatgacagtatctgtgtcctcatctgtaaagtcgggacaataactggtgttttttttgttttgttttgttttttgagacagtttcactctgtcacccaggctagagtgcagtggcgcgatctcggctcactgcaagctccgcttcccgggttcacgccattctcctgcctcagccccccgagcagctgggactacaggcacccaccaccgcgccyggctaattttttgtatttttagtagagacggggtttcactgtgttagccaggatggtctcaatctcctgacctcgtgatccaccggcctcggcctcccaaagtgcggggattacaggcatgagccaccgcgcccggcctataactggttttgactaatgcgagttgtggtagggcttgaaagaaatcacaaactaaatgtaaaatttaatttgaaaaatgctgtccaagcaggaactcacatccaggaacaaaatgaatggagaccagaaatccagatatgtatgcccaagaaaagcagaattttatccaggacttctcccagrttgtcaggatgctgactgaggatgagatggggcacccagagacaggagagtctattacctggctcaaagaggtcctggagtacactgccactggagacaagtaccactagggtttgatgatgctggtagcattccaggagctggcagagcccaggaaacaggatgctgatagtctccagcaggtcctgtctgggctgttgtgtgaactgctgtaagcttgcccgtttttttttgttgttgttgttgtttgttttttgagatggagcctagctctgccgcccaggatggagtgcagtggcacaatctcagctcattgcaacttccacctcctgggttcaagtrattcttgtgcctcagccccctgagtagccaggactacaggcgcattccaccgcacccagctaagttttgtatttttggtggagacggggtttcgccatgttggccaggctggcctcgaactcctgacctcaggtaatccccctgccttggcctcccaaagtgctgggattacaggtgtgagccactgcaccttgtgctgcaagctttcttcctggtggcagatgacatcagggattcatccctcaccttgctgggggcagatctgcttgtatcagaagccaggtgtaggtttggatgccatcaatgatgctatgcttctagaagcatctatctatcacctgttgaagctctgttgctgagagcaaccccattacctgaacctgaaaaagcacttcctgtggagttcctattagacagagatcaggcagaccctggaccccatcacagccccccagagcaatgtggatcttgactggttcactgaaaagaggtacaaatcactgtcaagtataagacagctttctacttcttctaccatcctgaagctgcagccatgtctatggcaggcgtcagtgtggggaaggaatgggccaatgacaggaagatcctgctggagttaggagttctttcagattcaggatgattaccttgacctctttggggaccctactgtcaccactggcagagtttgtactgacatccaggacaacagatgacaacaaatgcagctgactggtggttcagtgtctgcaatgggccacaccggaacagcaccagatcatgcagaagaattacagggaggaggcactatatgaggagctggatctgctgaccatgttcttggtatgtggaagatggttacagccaccttatgggtctcattgagcagtgtgttgcaccactgcccccagccaccttcctggggctagcgtacaaaatctccaagcaactgcaaggcagggagaggaggctctcaataaattactgtgtaatctttttttttkttkttkttgttgttgttgttgttgttttgagacagagtttcactcttgttgcccaggctggagtgcaatggtgtggtcttggctcactgcaacctctgtcttctgggttcaagcgattctcctgcctcagcctcccaagtagctgggatttcaggcacccgccactacgcccggctaatttttgtatttttagtagagatggggtttcaccatgttggccaggctggtctcgaactcctgacctcaaatgatacgcctgccttggcctcccaaagtgctgggattataggcgtgagccactgcgcccggcctactgtgtaatcttacaaaamaagaaaaaaagaaaacaatgctctaaaagagaagggaattttgtttctgttccatgcatagacctacacaggcttttttccttttgctgtttcccacttccatatcttattttatatggtacttttcttcctttccctttctaggaaaccctccctccacctttcctcctactcgacctttaggcctgggtaaaattttaatcttcaatacaatcatattgttttgtctcagcccacaagttttcatttatgtgaactatcagttttacaatttaacctctagtcattctccaaatatttttacacctaggcctcttatttctgcagatctcaagttgcttgaggtcatggtttgatagatttgttttcagctcagaactatgaaaactttattgtattaccctagacattgatttctaatgagttggttgtaggatgcaactggtttcttaagtgggggatatttttctagaatgtgggtacaacttyctgatgtgaggtcctcacaaatttttaaamtttgctccagcaaaaagaaccacgtagaggttctctacctgggtccttcctgcctcaccttctttaggtggagttggctccagtttcctccttgtctctgcctccaccccacccctgccccaggcctcatagtgttccacaggaatgacgtggtgactgtagtgagggttacagtgaagaattgcccactgtttggccttgctgaacagcaaatttgggccagcagtgggtctgttttctctcttttctttttatttatttatttttttgagacagaatcttgctctgtctcccaggctggagtgcagtggcgtgatctcggctcactgcaagctccacctcctgggttcactccattctcctgcctcagcctcccgagtagctgggactacaggcgcctgccaccacgcccagctaattttttgtatttttagtagagacggactttgtccgtcttagccaggatggtcacgatttcctgacctcgtgatccacctgcctcggcctcccaaagtgctgggattacaggcgtgagccaccgcaccgggcttttttttttttttttttttttttttgagtcggagtctcactctgtcgcccaggctagagcgcagcggcgcaatctctgctcattgcaaactccgcttctcgggttcaagcaattcatctgcctcagcctaccgaatagctgggattacaggcacgcgccaccgtgcccggctaatttttggacttttagtagagatggggtttcaccatgttggccaggctggtctcgaattcctgacctcgtgatccacctgcctcatcctcccaaagtgctgagattacaggcgtgaaccaccgcgcccggccagcagtgggtctgttttcaaccctcatgtaccctcagctctcaagcctgtgtgctcccaccccagccagtcaccagaatcacatagattttaaaacgacttatcctgggtccatccctacacatagtaaatgagatttttgctgggtagcttgggacgctatattttccaaaactccctgttgattggctgtatttgggaacccctgttgcgaaggaagatcccttatctcttcatctgtcactaatgatggtggcttgcrcactctgatggtacttacttggatgggattacagatggttccatcacacccatctgtatgaaatctcgtggtataagtgaatgtaggatgataagggacgagcctattagaggcttttgaagcaaatggatagtttaatcagattggtgtgttttttttttctgtagaactgctgtgaactagaccttgttatcaccatctgtttcgtaaattccattttcggtttaacagctggattgtgaaagatatacaaaattatccagttaaaaaactaaatttggcaagtgtgtrtgtgtttttaaaaatgactccttgaatacactgttttgattccttagacagtttctaaggctctaattttggtctaccagaaatattcagagtagtaaactgagaccagaaaggcgagttctttggcttggataactttgagagttaatagtatrcatgattggcagccttcagttttatccagcaataaatctaaacagtttaaaataagtactttccccttacctcagtacagagaggccctggccactgccatgcacatctcagaagctgagcagtggggcagaaggataacttgtaatttggcatcaatgtccaacacccttgagctctggactcttttattcattccttctactttaccattctacatcttgaaccactgtgcrtgcggttcccctaagaggcagtaaagtaattscatcagggtggagggattttatgtgctttcactttctcatttgattatttctacatcttaccgataaacttccatgaatattactgttgtaatgaggagcaaaatgttagtaaagataactttatacgtgaaaacttgaactcttaccaagaaacgtagtgtttgtgacarggctggctgagaggatgagaatagctcatcagtactgggttggctgaaggaaacatgcatgtcagtactattttgagggcagctgagaacatctatttcaatagctttggctatattttaatagctaagagcaacatatgaatttgtctctgccaaagatggagtgaaaatttccaaaataaccaaacttttactttttttgcaatacattaggtctttcctgctgacaaacctacagtttatgaaataagtttgtggagcatatcaaagctgtgcggcagctctgtgcactycagcagatggtgtgactggttgtctgtagtcgtcttagtttccgccattgtgtcagtctgtggaatgtttgggttcatgcttattttggccaagttttccaaattctgtcttggtaagtacaaaaagctgtgagtgtcggaagctctaacaagaggtgtactcatgatgaaagtgaaagcagagagagcgatttttttttcctctttgaatttgttttaacatgctcttacttgtaggacaaatttttcaaacargtggtagaaagcaaaacatcttaatgccatcttcagggcagaagactttgagttgcaggatgtgatttagggaggattttgaaagagtttgcagcactgcgtgaagctggctgggtcttcctgtgtactcctccttgccctcctcctatagcccctccatgcaaaggtaacctgtttttttaatgtttgtttctttttaaaatttttttatttttatagaaaaaacaaatgccagcatgtgtatgaagaccttaatttaaaaaaatatttttattggcctggcgcggtggttcacacctgtaatcccagcactttgagaggctgaggagggcggatcacctgaggctgggagttcaagaccagcctgaccaacatggagaaaccctgtctctactaaaaatacaaaaattagccaggcatggtggcacatacctgtaatcccagctactcgggaggctgaggcaggagaatcgcttgaagctgggaggtggaggttgcggtaagccgagattgcagcattacactccatatattatggagtatatatatatggagtatatatatatatggagtatatatatatatatatggagtatatatatatatatggagtatatatatatatggagtatatatatatatatggagtatatatatatggagtatatatatatatatgagtatatatatatggagtatatatatatatatgagtatatatatatggagtatatatatatatggagtatatatatatggagtatatatatatatggagtatatatatatggagtatatatatatatggagtatatatatatggagtatatatatatggagtatatatatatggagtatatatatatatggagtatatatatatatatggagtatatatatatatggagtatatatatatatggagtgtatatatatatatggagtatatatttatatggagtatatatatatatggagtatatatatattttatatattatgtattatataatatatattatattatatataaaatatatattttataatatattattaatgaaatttctcacatatacaagactgtatgaacaagtttaatcaaaatacattgggttttgacaaatcttagtattttgctataattgcttttaaaaaatacagatagtttaaacttcctagttatcacttcctgatccagttatcatctcactacagaggtaaccactatactgaatttggtccctaactttctttttttttttgagatggagtcttgctctgttgcccagactggagtgcagtggcatgatcttggctcactgcaacctccgcctccgggttcaagcagttcttctgtctcagactcctgagtagctgggattgctttcatgtcttttttttttttttttttttttttgagacagagccttactctgtcacccaggctggagtgctgtggtgcaatgttggctcacggcaacctccgcctcccagaatcaaacgattctcctgcctcarcctcctgagtacctgggattacaggcatgtgccaccacacccagctaatttttgtatttttagtagagatggggtttcaccatgttagccaggctggtcttgtactcctgccctcatcggcctccgaacgtgctgggattacaggcgtgagccactgcgaccggcctcatgtctatttttatactttcattttctgtatatgtttacaaacaacatgtaacattgtttttacttaatttaaatggctcatactctacatatccttctgctacacgctttttacactgaatatcctttcaaggatttataaatgcagcccaaatttactgactttcattgctgggtcatattttattgtgagtttacccaaactgtgtaattgttcttctgattcactcttctctatttttgctattaccaacaagatggcagtgattttttttttttttttttttttttttttgagacagggacttgctctgttgcccaggctggagtgcagtggtgtgatctgaagtcactgcaaccttcgcctcccaggttcaagtgattctcgtgcctcagcctcccaagtagctgggactacgggtgcatggcaccacatccggctaatttttgtatttttagaagagatgggttttcactatgttggccaggctggttttgaactcctgacctcaattgatccacctgccttggcctcccaaagtgctgggattacaggcgtgaaccactgtgcccagctgaaaattcttatgttcccttggctgcatgaatttctttggagtcccttcatttaaaaatgtattttaaggaagtgaattggtccagcgtggtggctcacacctgtaattcgagcactttgggaggctgaggtaggaggagcttgagcccaggagttcaagatcagcctgggcaacataatgagactctgtctctacaaaaaaataaaaaattaactggatatggtggcatacctctagtcccagctactggggaggccaaggtgggaggattgcttgagtctgggagatggaggctacaatgagtggtgattgcactgctgcactccagcctgggtgacaggacgagaccttgtctcaaaaagaaaaaaaagtgaatcatagagtaaagacagacatattaattgaataaacacagaagatctatgtttaactccagctttgtgcatggtgttacagggaagtgtgtagaagctccaaagccttcagatataatgcttaactcagaaacttatagcccagtgtgtctgtgggacgtgggcacaaataaccatggtactacgaggcatgatgagataagcgctgtatgctggtggaggtagctctgatattagatggaactatgagggtctggaccattctccaccaaatcaggataggcttatctttgttagcaccttgagttgatttaattccagccaaaagcagaggtgtgatgccctaggcacttctctctgtctcttctcttaattttaaaaccagtaggcagactccattagctctttcctatcctttaggatggatgctcactcagatgttccaagtcatcttccactgtcttttaactctgtccttccagggagatgcgtcaggtgtccggcttcctcagagagctggagttgttggtgctgatcaccagatactccagacggcactaattcctatactatgggttcagagggaactccattggacagaaatttccttttgaggaaatctttccctggagtttcttcttacctttttccctcactttctccacagcagaaacaggtctgtttgtccttaaatatttacctatatatttgagtaggagcattttgaagagatgaagtttctgtgtagcagcacaaaacatgaaatagttcaaaccaggggcactctggttctcagaccgggagcttcaggatcttctgggaacttgttagaaatgcaaattctcaggtctgctcagatcacctgaaacagaagccctaggggtggggcctagagatttgtgtcttaacaggcccacagcgggagtctgggaacccctgtttcgaagtatgcttaaataagcacttgggggccaggcatggtggctcatgcctgtaatcacagcactttgggaggccaagacaggcagatcccttgagctcaggaatttgagaccagcctgggcaacatgacgaaaccccatctctacaaaaaaatacaaaaattagccaggcatggtggcttgcgcctgtaatcccagctactcaggaggctgaggtgggaggatcacctgagcctaggaggtggaggttgcagtgagctgagattgtgccgctgcattccagcctgggcaacagagggagaccctgtctcgagagaaaaaaaaaagcacttgggcttgtattgtgggcctgtcttactatactttcagaaaagggtctggcagactaaatacttgagggatgttacccagcagtgttatttgttgacattgcttaattatgaatgacatgagaaaggtatacctgaaaactgacattgtgtggtgttgttgtagacaaacctttaacttgtggaggctgctttcattttgtttgtggttgtgaccaaccgtaggaaacagaatgccataaatccctgtttccagggttaccttcttgctgctgataacaggcaggaaattaaaacaatatgtgatagtgttctgttcttattacctacagatggtagcttttagatatgttggagcaaaacataagtaaatatagcagggaaactttattactgaagaaaaatgatttggctaggtcaaggttatagtctggttcattttaataaaatggggcataggcaacatatcagtgttccattatcacatgaagcatttagctgtatgaggatcactagattttttttctctttgatttaattttgagtatgtaaaacatttacatgattccaaggtcaaaactgtgtaacaaattatattcaaagatgcttccctttcatccatatcccttctgtctcttctcttactgctttgcaggtaatcatttttactagcttctgaatttatccttccagtgtttctttttgcagataagcatatacattcatatgtatatgtcatatgttcatagctcctccttccactttcattacacaaaaggctacatactatactacaattttaaaaattattattattattatgatttttagagacagggacttgttctgtcacccaggctggaatgcagtggtgtaatcatagctcactgcagcctcaaactcctatcctgggttcaagggatcctcctgcttcagccgcctgaatagctaggactataggcacatatcaccatgcagtactttataattttttttttattattatactttaagttttagggtacatgtgcacaatgtgcaggtttgttacatatgtatacatgtgccatgttggtgtgctgcacccattaactcgtcatttaacattaggtatatctcctaatgctatccctcccctctccccgcaccccacaacaggccccggtgtgtgatgttccccttcctgtgtccaagtgttctcattgttcaattcccacctatgagtgagaacatgcggtgctttttgtccttgcaatagtttgctgagaatgatggcttccagcttcatccatgtctctacaaaggacatgaactcatcattttttatggctgcatagtattctgtggtgtatatgtgccacattttcttaatccaatctatcattgttggacatttgggttgcttccaagtctttgctattgtgaatagtgccacggtaaacatacgtgtgcatgtgtctttatagtagcatgttttataatcctttgggtatatacccaataatgggatggctgggtcaaatggtatttctagttctagatccctgaggaatcgccacactgacttccacaatggttgaactagtttacagtcccactaacagtgtaaaagtgttcctgtttctccacattctctccagcacctgttgtttcttgactttttaatgatcgccattctaactggtgtaagatggtatctcattgtggttttgatttgcatttctctgatggccagtgatgatgagcattttttcatgtgtcttttggctgcataaaggtcttcttttgagaagtgtctgttcatatccttgagaagtgtctgttcatatccttcacccactttttgatggggttgtttgtttttttcttgtaaatttgtttgagttcattgtagattctggatattagccctttgtcagatgagtagattgcaaaaattttctcccattctgtaggttgcctgttcaccctgatggtagtttcctttgctgtgcagaagctctttagtttaattagatcccttttgtcaattttggcttttgttgccatcgcttttggtgttttagacatgaagtccttgcccatgcctatgtcctgartggtattgcctaggttttcttctagggtttttatggttttaggtctaacgtttaagtgtttaatccatcttgaattaatttttgtataaggtgtaaggaagggatccagtttcagctttctacatatggctggccagcttttccagcaccatttattaaacagggattcctttccccatttcttgtttttgtcaggtttgtcaaagatcggatggttgtagatatgcggcattacttctgagggctgtgttctgttccattggtctatatctctgttttggtaccagtaccatgctgttttggttactgtagccttgtagtatagtttgaagtcaggtagcgtgatgcctccagctttgttcttttggcttaggattgacttggcaatgcggtctcttttttggttccatatgaactttaaagcagttttttccaattctgtgaagaaagtcattggtagcttgatggggatggcattgaatctatggccattttcgcgatattgattcttcccacccatgagcatggaatgttcttccatttgtttgtatcctcttttattttatggagcagtggtttgtagttctccttgaagaggtcctttatgtcccttgtaagttggattcctaggtattttattctctttgaagcaattgtgaatgggagttcactcatgatttggctctgtttgtctgttattggtgtatagaaatgctcgtgatttttgcacattgattttgtatcctgagactttgctgaagttgcttatcagcttaaggagattttgagctgagacaatggggttttctagatatacaatcatgtcatctgcaaacagggaccatttgacttcctcttttcctaattgaataccctttatttctttctcctgcctgattgccctggccagaacttccagcactatgttgaataggagtggtgagagagcacatccctgtcttgtgccagttttcaaagggaatgcttccagtttttgcccattcagtatgacattggctgtgggtttgtcatagatagctcttattattttgagatatgtcccatcaatacctaatttattgagagtttttagcatgaagcgttgttgaattttgtcacaggacttttctgtaactattgagataatcatgtggtttttgtcattgattctgtttatatgctggattacatttattgatttgcatatgttgaaccagccttgcatcccagggatgaagcccacttgatctggtggacaagctttttgatgtgctgctggattcggttagccagcatttttttgagggttttgcatggatgttcatcagggatattggtctaaaattctctttttttgttgtgtctctgccagactttggtatcaggatgatgctggcctcataaaatgagttagggaggattccctctttttctattgattggaatagtttcagaaggaatggtaccagctcctccttatatgtctggtagaattcggctgtgaatccatctggtcctggatttttttggttggtaggctattaattattgcctcaatttcagagcctgttattggtctattcagagattgaacttcttcctcgtttagtcttgggagggtgtgtgtgtccaggaatttatccatgtcttctagattttctagtttatttgcatagaggtgtttatagtattctctgatggtagtttgtatttctgtgggatcagtggtgatatcccctttatcattttttattgcatctatttgattcttctctcttttcttctttattagtcttgctagcggtctatcaattttattgatcttttcaaaaaaccagctcctggattyattgattttttgaaggcttttttgtgtctctatctccttcagttctgctctgatcttagttatttcttgccttctgctagcttttgaatatgtttgctcttgcttctctagttcttttaattgtgatgttagggtgtcaattttagatctttcctgctttctcttgtgggcatttagtgctataaatttccctctacacactgctttaaatgtgtcccagagagtctggtatgttgtgtctttgttctcattagtttcaaagaacatctttatgtctaccttcatttcgttatgtacccagtagtcattcaggagcaggttgctcagttttcatgtagttgagcagttttgagtgaatttattaatcctgagttctagtttgattgcactgtggtctgagagacagtttgttataatttctgttcttttacatttgctgaggagtgttttacttccgtcaattttggaataagtgtgatgtggtgctgagaagaatgtatattctgttgatttggggtggagagttctgtagatgtctgttaggtctgcttggtgcagagctaagttcaattcctggatatccttgttaactttctgtctctttgatctgtctaatgttgacagtggggtgttaaagtctcccattattattgtgtgggagtctaagtctctttgtaggtctctaaggacttgctttatgaatctgggtgctcctgtattgggtgcatatatatttaggatagttagctcttcttgttgaattgaattgatccctttaccattatgtaatggccttctttgtctcttttgatctttgttggtttaaagtctgttttatcagagactaggattgcaacccctgccttttgttgttttccatttgcttggtagatcttcctccatccctttattttgagcctatgtgtgtctctgcacgtgagatgggtttcctgaatacagcacactgatgggtcttgactttttatccaatttgccattctgtgtcttttaattggagcatttagcccatttacatttaaggttaatattgttatgtgtgaatttgatcctgtcattatgatgttagctggttattttgctcgttagttgatgcagttttttcctagcctcaatggtctttacaatttggcatgttttttcagtggctggtaccggttgttcctttccatgtttagtgcttctttcaggagctcttgtagggcaggcgtggtggtgacaaaatctctcagcatttgcttgtctgtaaaggattttatttctccttcacttatgaagcttagtttggctggatatgaaattctgggttgaaaattcttttctttaagaatgttgaatattggcccccactctcttctggcttgtagagtttctgccgagagatcagctgttagtccgatgggcttccctttgtgggtaacctgacctttctctctggctgcccttaacattttttcctwyatttcaactttggtgaatctgacaattatgtgtcttggagttgctcttctcgaggagtatctttgtggcattctctgtatttcctgaatctgaatgttggcctgccttgctagattggggaagttctcctggatgatatcctgcagagtgttttccaacttggttccattctccctgtcactttcaggtacaccaatcagatatagatttggtcctttcacatagtcccatatttcttggaggctttgttcatttctttttattcttttttctctaaacttctcttcttgcttcatttcattcatttgatcttccatcactgataccctttcttccagttgatcgaatcagctactgaggcttgtgcattcatcacgtagttctcgtgccatggttttcagctccatcaggtcctttaaggacttctctgcattggttattctarttagccattcgtctaattyttttaaaggtttttaacttctttgccatgggttcgaaattcctcctttagcttggagtagtttgytcgtctgaagcctttttctctcaattcgtcaaagtcattctccgtctggctttgttccgttgctggtgaggagctgcgttcctttggaggaggagatgcactctgatgtttagagtttccagtttttctgctctgttttttccctgtctttgtggttttatctacctttggtctttgatgatggtgatgtacagatgggattttggtgtggatgtcttttttgtttgttagttttccttctaacagtcaggaccctcagctgccggtctgttggagtttgctggaggtccactccagaccctgtttgcctgggtatyagcagcggaggctgcagaacagyggatattggtgaacagcaaatgttgctgcctgatcgttcctctggamgttttgtctcagaggagtacccggctgtgtgaggtgtcagtctgcccctccttgggggtgcctcccagttaggctactcgggggtcagggacccactttaggaggcagtctgtccattctcagatctcaggctgcatgctgggagaaccactgctgtcttccaagctgtcagacagggacttttaagtctgcagaagtttctgctgccttttgttcggctatgccgtgcccccagaggtggagtctacggaggcaggcagggctccttgagctgcggtgggctccacccagttcaagcttcccagccgctttgtttacctactcaagcctcggcaatggcgggtgcccctcccccagcctcgctgccgccttgcagtttgatctcagactgctgtgctagcaatgagcgaggatctgtgggagtaggaccctccgagccaagcgcaggatattatctcctggtgtgccgtttgctaagatcgttggaaaagtgcagtattagggtgggagtgacctgattttccaggtgccatctgtcaccgctttctttgactaggaaagggaattccctgaccccttgtgcttcccgggtgaggtgacgcctcgccctgctttggctcactgggtgcgctgcaccccctgtcctgcacccactgtccgacactccccagtgagatgaacccgatacctcagttagaaatgcagaaatcacccgtcttatgcgttgctcacactgggagctgtagactggagctgtccctattcggccatcttggctccacccccaccctttttttttttttttttttttttttggtaaaaacagagtctggctaggttgggcagtctggtcttgaactcttggcctctagcaatgttctcaccttcgcctcccaaagtgctagaattacagatgtgagccaccgcacccagcctaaaaattatgtttgaagttagctttattaaggtgtcacttatcttatgtaaaatttacctactttacatgtacaatgtgaattttaacaaacgtatgcagttatatagccacccatacagtgaagataggaactatttccatcacccaaaaaagtttctttctttccttttgcagtgaagtyctctctcctacctctctggccctggtaaaccacctgtctgccttctatcactatagttttgccttttctagaacataggtagtctcttctgtgtatggatgtcttctttcacattgtagtgtactttggagactcaaaccatgttattacatgtatcagtaattcattccatcttcttgctgagtgtactccattgtttatatgttccagttgagggacattgtccttttgctttttagaaaactttttattgggccaggcacggtggctcacgcctgtaatcccagcactttgggaggctgaggcaggtggrtcacctgaggtcrggagttccagaccagtctgaccaacatggagaaacccgatccctactaaaaatacaaaattagcyrggcgtggtggtatgtgtctataatcccagctactcaggaggctgaggcaggagaattacttgaacctgggaggcagaggttrcagtgagctgagattgtgccattgcactccagcctgggcaacaagggcaaaacttcgtttcaaaaagaaagtttttattttgaaacaattttagactgacttacagaataattataaagatagtagagagagttttcatataccctttccccagtttctcctgatgtttaacatctcacatggccatggtacaattatcaacatttaagaaattaatactggctgggcatggtggctcacgcctgtaatctcagcactttggggggccaaggctggcagatcacgaggtcaggagttcgagaccagcctggccaacatagtgaaaccccgtctctactaaaaatacaaaaaaattagctgagtttggtggcacgtgcctgtagtcccagctactcgggaggctgaggcaggagaatcgcttgaacccgggaggcgaaggttgcagtgagccgagaccacgccattgcactccagcctgggtgacagagtgagacttcatctcaaaaaagaaattaatattggagccaggtggtggtgcatgcctgtagtcccagctacttgggagaccaaggtgggaggatggcttgagccgtggagtttaagactagcttgagcaatatatcaagatcccatctctaaaataataataataataataaggccaggtacggtggctcacgcccataatcccagcactttgggaggctgaggcgggtggatcacgaggtcaggagatcgagaccatcctggctggcatggtgaaaccccatctctactaaaaatacaaaaaattagctggggtggtggcagacgcctgtagtcccagctacttaggaggctgaggcaggagaatggtgtgaacctgggaggcagagcttgcagtgagcygagatcatgccactgcactccagcctgggcgacagagcaagactctgtctcaaaaaaagaaaaaataataaaaatatactttattttaaaaagtaatattggtacaatactattatttaaactacagactttattcagattttcattgtcatttctctagtctcctacaatctgacaattccttagtctttctgtgtctttcatgactttgatgccttaatttttttttttaatttttaaacacttaaaaaatagagacaggatcttgccctgtcactctatttggagtggagtggtgcaatcatagctcattgtagcattgaactsctgggcttaagtgatcctcctgccttagcctcctgaatagctatgactataggagtgtgctgccgtgcctggctaatttttttcttattttttgtggagatgggatattgcagtgttacctaggctggtctcagaatgctgggctcaagtgatcctcccaccttgccctaccaaagtgctgggattacaggtgtgagccactgtgcctggcctgatgctttctaagagtacttgtttagatattttgtgtccctagatttgtctgatgattaggctgcagttatggatttttgggaagaataccgcagaggtgatgtgcccttctcatggtgtcctatcaggagctacctgatgtcagtatgtcctgttactggcaaagttaaccttaatcatttggttaaggtagcctctgccaggtttctccaccaagttactatttttccttttctgtactctgttaaggcaaattattgctttttaaattttgatgtacctcaatatgcatgggagatacatagctttgcagctccctcaatcttaattgtaataataatagtaataacaataactagcacttgctccgcctgcatagttctaaacacatgtgcccatttaatcctcatgacaccctgtgaagcaggcactttatgctcattttatagccgagaagactgaggtacagagtaccttgcccaaggcctaataactagtaagtgatggagccagatcyttttttttttttttttttttttttgagacggagtcttgttctctcttgcccaggctagagtacagtgacatgatctcggctcactgcagcctccacatcccgggttcaagcaattctcctgtctcagccccccgagtagctgggactacaggcatgcaccaccacgcctggcttatttttgtattttcagtagagacagggtttgaccatgttggccaggctggtctcaaacacctgacctcaggtgatccacctacctctgcctcccagagtgctgggattacaggcatgagccactgcacccagcctggagccagctcttcacttcgcctgagttgaagggctgactttaacatgggccatatggttgtcgtcagagcttaggatggggacgctctcattctttgccagagaaaacaaatgcttcctatatttaatgcttctctcttgttttttctttaagacatttttttggtttgtttttccttccaggaatatatcttgtgtgactaaagattttagtaagctatatgtggcaatcataccatattaaaatcttggggagaaatccaagaaacttttggaaacattaaggatctatttttggtcttcttttcagaaataagactgaaggtagggcagaatattcagcatagaaaagtgctgtggtagaagaaatactcagtgagtgacactgcgcctttttctcctgggatgttatcagccacttctaccaggggtgtctctgtttgtctgtatgtgtctaaccctgccatgttcgcctttcttgaccacactaatgacttttctatgacacagtcaaatgtatctctgaatagcctgacttggggtaataactgtggtttacgtgatgacttggtctctgtgagccccctattctagtagcagtggagccactgaaggtcaggcagtgtgggtggacatttgtccatcttcctgtgactcactcagccgcctgcctttctgaggggaaagagctgcaggtgcaaagctctaatacatcccttcccttctctgtctaattctattatgtatattgcatatcccccaaatccttgaaattactcagctacgtgtcttattatatctagtctgccaagctgtctaggtatcagtacagtttttttctatgtctatatttattttccgaaaatgaaatcctactgtatttctttgtagcttcttttctcatttgacaatatagctgaagaagtttccatgtcatatggcatttatctacaatgttgtttgggtacctgcctattatcaatagcttggctatattatgattggtggggaatgtggcttgtttccctctatccctcttcagcatccaggacaggatgttcttgcagtcaccgaatgttaggaagctcagagtgctctcaggcatcatctgattaatcttttcttttgcacatagcatagttgaggataagtcagtgcaatttttaaaaataaagctttttttttttttaatgtctattgtatgtctggctggaagtgccagggtccacagcttaaacaagacactgcttatcttccaaagccttcccagagaggcatatacacacaaactgtaggatttatttccttaggaaggcaactgtttagaataagtctgatgctagcctacaatatatagaacactttacaaatgtagaaaattacttggggaattgataatagaggtcaggtttacaggtgtctggatctggcctcagaagtcagagggctaaggattagtctttttctcagatatggttttctacatattgattatagacaaaatataaagtagaagaaaatgtaaggaagaaagtgaaagtggcccatttctactgccagaaatagccactgttttattttggtataatttttcctttcctccctccgttctccttcctcttccatactgcaaatatgttcataatcctgcatttttcatgtaacactgtatcaaggatttttaaatgttacttacagaaaaggactttgctactttgataaggaaaaatatctagttttaatttgtattcccttaatatyttagggaggattaaygttcgtttatgttgactgtctattcatgtttatccataattctacctttctataaaattggacatgttactaaagcaagcctctgatttcagatgtcctaaacgatgctatatttgatgaagatcatgatgagatggtgattgtgaaggwcawagacatgttttccatgtgtgagcatcacttggttccatttgttggaaaggtaaggttctctttgttgtttcccagcaatttaaaacatagtgaaagtttttcaattagaataattatatttaaaatttttagctgccaattgctgatatctcaggtatttacaattatacatatatggttattctttattaacctgactaataacttgaaacttaaaaaacaaaaccaaagtagcagaaggctctcaggataagcctttcatgttaaataccaggttcataggttaaaataatgaggtttaagtagcatctctctctctcttttttttttttgtagctactacaggctctgaaaacctttaacctttatttatttattattagcatcccaatctagagatgccctttattttaacttgaataatgtttgatccaagatagatatgtatgtatggcatgtcatgagcaacaataattgcagaatttcttgtgacagaggttatggtatttgtggatttgtttccattcctttctatattaggaaaagtgaatctaatgcattagattcctcagcacctctgtgaatttcttttgtcagaaatgtttagtcctagtcttatgaaactttagatctaatctagtttacaggaaatccagaggctgaatggaacaaatccagaaggtggggcactctgctgaacagctggcctattctcttttcaatagagaatattatgggtgggagcactattttaggacaaaagggacttaagaggtataaccaaatgcagtgtaaatacaaatgtgtgactctccattggattcctgtttaaacaaaccaaaagtaaaacatttgagacaattggaggaatttaaatctgagttagttattagatgttgtctaggaatgactacttaacatacctttgagaacatgtggtatagaacaaagagttgtcccatttccctacccccatcataattttatttaattttgactctttattaataatctttaaacagaagacttacaagaagcagtgttatgaatacttatatacccatcaactaaagttaaagtgttaacatttgcttcatttttgtctttgttaaagtattgtatcttttcacttttttatggaaataatatatagatagaaaatgcataaaacttaagggtgttccttaccacttcagagatcaagaactagaataggctggcacggtggttcatgcctgtaatcccagcactttggaaggctgaggtaggtggattgcttgaacccaggagttcaagaccagcctgggcaacatggtgagaccccatctctaccaagataaaaataaaaattacctgggcatggtggtgcatgcctgtactgccagctactcgggaggctgagatgggaggatggcttgagtccaagaggcaggggttgcagtgagccgagattgcgccactatatcctagcctgggcaacagagccagactgccagaccctgtcaaacaaacaaacaaacaaacaacaacgaaacccccacaactacaatatgtgtagcatcctggaagctcacctcatttcttttctcttcttaatccctaatccatcctttgtatcagtttatcaacttataaccctatggattcgttttcttgtttttcaactatatgtaagtggaaagattctacgatatgtactctttgtgtctggcctctcttgttctacatagtcggattcattgatgtcattgcctgtcattgtagtttattttcattgttatatcttattccattgtacaaatataccacaatttatctattctgctcttggtggacctttgtattgttgcctcttttttttttttttttttttttgctattacaaacaatactgctgtcaatacttttttggagtacatgtgcatgcttttttttttttttttttttttttttgagacggagtctcgctctgtcgcccaggctagattgcagtggtgtgatctcggctcactgcaagctccacctcccgggttcacgccattctctcacctcagcctcctgagtagctgggactacaggcgcctgccaccatgctggctaattttgttgttgtatttttagtagagaaggggtttcacggtgttagccaggatggtcttgatctcctgacctcgtgatccgcccgccttggcctcccaaagtgctgggattacaggcgtgagccaccgcacctggccctaaaatattttcttacttatccacagcagcactatcacaaaattaacaataattcttaaatagtgtctaataacgaattcatatttaaatttctccaattgtctcaaatgtttactcttggtttgtttaaacaggaatccaagggagagtcacacatttgtatttacattgcatttggttatacctgttaagtcccttttgttctaaaatagtgctcccacccataacattctctactgaaaagaaaataggccagctgttcagcagagtgccccaccttccagatttgtttccttcagcctctggatttcctataaactagattagatctaaagtttcataagactagggctaaacatttctgataaaagtagttcgtaagggctgggcacggtggcttacgtcagtaatctcaacactttgggaggccaaggcaggtggtggatgtatcgctttgagctcaggagtttgagaccaacctaggcaacatggtaaaaccctgtctctaccaaaaaaaaaaaaaccaaccaaaaaaaaaaaaaacgaaaaccaatcaaccaaacagacaaacaaaaaaacaggcaaaaattagctagcatggtggcatgcacctgtggtctcagctactcgggagggtgaggttggagaatcgcttgaacccaggaggtcgaggctgcagtgagccgagatcacaccactgcactccagcctggcaagagagtgaatccgtgtccaaaaaaaaaaaaaaaaaaaaaaagagtagtgcttcataagggtgctgaaracttcatattatatcacatcagggccgagtgaggtggctcatgcctgtaatcccagcgacttgggaagtcaaggtgggaggatagcttcaggtcaatagttcaagaccagcaagtgagactgtctctaccacaaaataaatttttttttaaaattaattgggcatggtgggtgcatacctgtagtcctagctactttttgggagtctgaggcaggaagattgcttgagctcaggagtttcaggttacagtgaactatgatcatgccactgtaccccaacctgggtgacagaacaagaccttgtctctaaaaagaaaagaagagaaagcaatcagaaaacccagatacatcacatcagaagccatatcgtatctggaaatcctgcaattgataatgaaggaatctttgaaagggaatctattggtgagcaaattagrcacagaaagcctgtgacttgttcaagaggatagagagagttagtggcttggctgcagccagatccaaggcactgattctgtactcagcctgtcaccattttatcctgttactttctgctattacttcctcagtgtttgtgtttttgctacctttgttttaaaaatatattatttagtgattttttttttttttttgagacagtttygctcttgttgcctaggctggagtgcagtggtgcgatctcggctcactgcaacctccgcctcccaggttcaagcaattcttctgcttcagcctctcgaatagctgggattacaggcacccgccaccacgcctggctaatttttgtatttttagtagagatggggtctcaccatgttggccaggctggtcttgaactcctgacctcaggcaatccacccaaaatgttggaattacaggtgtgagccaccactcctggcctatctagtgattttgtgaaatggacatttaaattacctaggatcttaagaccaaaaatagtataaacaatgaacaaattccgtgtctgcatggaaatgtaaaaatttcagacagcatagaagaccttggttcatgggaaagttttaactctctaatttttctttgaaatcctcaatgttcaggtgctattttactttttcctcctgccaaccaggaaggcaatgaggtggacttctcaaattcctaaagcatagtgccaatggatgggggaaaaaatcactaagtactactagatcaattatgtaaatagtaagtgaacaatgaaaacagtgttagcaaaccatgatgccgttgagtctctaattttatattcggttaattaattgcctacaagtgaccatttactctattaatcttttcagagaactaatgtttttcgtatgtagtatttggccccaaaagagtaacttttatatttgatattaattggtgccatttaagataacagaaatggcctggctgtatattgggtcctttaaaacttagttcttagggtgcaggttcttgccaagccatggtggtagcagtgccctttttctccagttaggaagatggggccgggcgtggtggctcaygcctgtaatcccaactctttgggaggccgaggcgggcagatcacaaggtcaggagatcgaaaccatcctggctaacayggtgaaacaccatctctactaaaaatacaaaaattagctgggtgtggtggcaggcgcctgtagtcccggctactcaggaggctaaggcaggggaattgcttgaaccttggaggcggagcttgcagtgagccaagattgggccactgtactccagcctgggcgacagagtgagactccatctcaaaaaaaaaaaaaaaaaaaaggaagatggtgcactctctagcagcttagaaaccaggaagccaagcacaaaagggtgtggagaccttctgtgctgcagggctttgcggtgggatcttaaggctgtgaggtgggatcttaaggctgctgtgatgtgtggaatggcaatacttatgcttacagtttttgccatttaaaggaggctttcctgtatacattttagtgttgctatgagatcatttgcctttccttgagaatgtttctcctccataaagaagaaactttcagatttgtgtcaagagttcaacttcacaggtaagtgtcagggccatgcaattgactcttgaacaacatgaatttgaactgcrtgggtccacttagacatggctctttttcaagcaaacactgatcaaaaattctacagtatttgcaggatacaaaacctgtatagatggaggggcaacttttcatatatgcaggttctgcagggccgactgcgggacttgagtatgcaggatttgggtatacacaggggtcctggaagcaatctcccgcatttaccaacggacaactgtacaagtttgttatttgattaatagactcatacttatatattttgcttttactgcatttatgtaattttaaaaatacatatataaatgtttcattttctaagtcttaacagttccagatgttttcaaggtaatacattgtcgtgataaattacataaaagtgtactatattctttctatatttccttattttgtcacaaagaaggcactgtattttcactcagctaatgatttccgtctcttctctgaaggtccatattggttatcttcctaacaagcaagtccttggcctcagcaaacttgcgaggtaagtgtgactgtgcagtgaacaagaatacaggtttataggacctgccctcatctgctgagaatctatctcatcaggctttctctctttacctgtatggatctaacttggaagtcatattgcaacttaaagacttggagggtctgaaacacagatgccccttccttctcgtcccctactgcctgcttcctcttccacttcccaccctttcttccatagatacatacatcctggaagtctcagcccacctctttctctgcagagccttctctgactggagaggtcctgagcttaccttcagtccagccccatcctttaaggggggtttagctaacagtgaggggttggggaagaagctgggcaggggtctagctgcagtgctctgctgtcgaacttgttgtcaggmctgaggactcttctatccttgtcaaggggagtgctcaccttctttgctttcatacaacactgctttcagacttgtaatgaaacttccctgtgggatccccagcctcaaccctgccttgctctgcactggatgcctccaggcatatctcaggggtcctgcaggccagtccgttcatgtctaggttctttgtttctgcaaacacaagactgcctgccttggctttgcacagctttattctgatacagtgttcacgctcctcgctctcatttctctttcctgctacaatcttcttttctgttgtttatcctgtgggttcatgccttaaaaaattcccttactgccttttttatttgggttttaggagaggtgatgtacatacacgttcatctgtgtttaactggaagtcaacatgggggtttgtgttcagatatctctggtaggccccagccaccaatattttattgcccttaaatatccttgttgtttcttcgtataaagttagtgaattttgagtgatggaggaaatactgggaggtgtgtgtgtgtgtggagagagagagaaagttaagaacaagatgaaggggtcgggtaaagtgttcctactctttttttttttcaaaaataatcaagctaagtttgaataacttgaggttatagtgaccatatcataattgaaataaatgagtctcggccgggtgccgtctttcacacttgtaatcccagcactttgggaggctgaggcgggcggatcacttgaggtcaggagtttgagaccagcctcaccaacatggtgaaaccccatctctactaaaaatacaaagattagctgggcgtggtggcgcacacctgtaatcccagctaatcaggaggctgaggcaggagaattacttgaacccgggaggcagagcttgcagtgagccgagattgtgccattgcactccagcctgggcgatggagtaagaccctatctcaaaaaaataaaaataaaagaagaggaataaatgagtctctgtgaccagttgactgtgctgtggctctgatgtgttcctgtttctttatgcaggccctgggatttaacacagttgtgaaatggtggtcctgatatttctcaattctgtgttggaatctgtaaaaaaaaaaactactccagcaatctgacaactgccctctaaagttgttcctgttactttgttttcacttccactttctcattcatttcctctggggatcaataagaaagtgggtagaagagacaaatttaacttccccagtttctgacctcattcctgctcagctattttgctattagatagggctgcttggcaccatgaaagaatattatatcatagctgtaattgcttcactggaataaggctcttagcacaaatccagaaacattctggctgcttgcgtgtgatccatccctggtggcagtgctgaaaagttgctgagaaaaagtgtgttggtagtgattgggagtaattaatcttactataatttttattaacgactcccttcccagtaacttaccctcaactaatgatgtattaaaccaatttcatgtcaactgtgagtaaaagtatctttactaaaattggttattcttatggttttataatatacagtctaagtaaaatcagcatgcttactgtgcaaacatagctgtaggcccagtcccctgggcctccctgtcagcaagattgctaaccctataccttgcccatatagaaattccagcactgctgatgcctataacagactgtccatatgtgaaaggtgtaatggatagtttcatagtgtaaaaaagcttggcagatcacattaggccttggtcttaatgtaacagccttctctgaaaaaccaactgttgatcatgattaacactttatgggaaatggactcttgagtgattcagtgagatcatacaataaatggcaacctggtggtagaaggaaataatcttagttatttcctttccaagtgaaaggaaaagatctcaaataattaagcttttatgaaacaatacaaaggagttgattattagcatggggatttgtccttagactaataggattaaaatttaagaataaaatggaacatgaagccaaagaaccaagtgtatgttgctttcaaatattttgcaaaaaatttgaataaagagtctattaaatagaaaagaagactaagattttatccaactacttattccttataagaagtaagaatatttagagaatgaagaggaataaaagctgaatgtcttagcaaaacttcactgctcattttaatcttatatatgaagtttgttatatgcttgcctttaaatgaatgacctttcagtgccagtgaagtcaaatatcaagcagtaaagccttaagtaacaagaaaatgccagaagtgagttgatctggctcaactctagtagaattctagaataaacttagtttgaatagaactttcttttgttgctgaaaagccattgaacatgtattcattttcttcccttagaaataactgagcctcggctgggtgaggtggctcatrcctgtaatctcagcactttgggaggccgaggtgggcagatcacttgaggtcaggagttccagaccagcctggccaacatggtgaaaccccatctctactaaaaataccaaaattagcagggcatggtagcatgcgcctgtaatcccagctacttcggaggctgagatggaagaatcgcttgaacctgggaggcggaggttgcagtgagccgagatttcaccactgcactccagtctcgtgacagagcaagactctgtgtcactaaaaataaataaataaataaataattgagtgaatgtacgaaatcttgaatttagagttgtagtatctcaggtagccatggctgacctgttgggtgggcactgtgccagctactgtggaggctaaagaagcaggacatggcagccaccctcaaggagagtgcacagggcaagactgcaagtgccatggaaatgcctgctgtagctccaagttcagaggagccatgatggctgtggcctggcaggtgaatagacctggaggtggagggatgagcagaattctaaatgggggagaagtttctctaggtatagttaatgcatgagcaaagaccagtcagagggtaggagcaaggcctattccagtggatgggaaccagattgactgatggaagtaagagtaagtgaggtgagtattagattacagagggagcagtatttttttttcttttttgactataaaagcaacataccatttaaatacaaatgagtgaataaagtgaaaacttttcttacctattttcattccccagagttagaactagagatttctttcactatccttctggaaaatatttatgcaagcacaaacataagatcatatcttatattctgtactacaacttgctttttaaaattttattttatttggtgtttttttgagatggagtcttgctttgtcggccaggctggagtgcagtggtgcgattttggctcactgcaacctctgcctcctgggttcaagtgattctcctgcctcagcctccccagtagctgggattactgatgtgcaccaccatgcctggctaatttttgtattttcagtaaagacagggtttctccatgttggccaagctggcctcgaactcctggcctcaagtgatcagcctgccttggcctcccaaatgctgggattacaggcatgagtcactgcacccggccagcttttttttttttttttttttttttgagacagggtctttctctgtcgcccaggctggagtgcagtggcactatctgggctcactgcagcctccacctcctgggttcaagcgattctcctgcctcagcctcctgagtagctgggattacaggcgtgtaccaccacgcatagctaatttttgtatttttagtagagatggggtttcaacatgttggcaagactggtcttgaactcctaacctcaggtgatctgctcaccccagcctcccaaagtgctgggattacgggagtgagccaccgcgcctggccctggccagctttttaaaaatttaaaataccttgaagttctttggacatcttttagtccaaaaagtccaagtttcttttcatagctacctaatatttctttgattaatacaattcatttaaccagtatttgctatagataagtacagtttgcagtttgagacttgccaaaaagtaaaaaagtaccctggtgaacaaattttattatctttgtgtgctttgaatctatctgaagtttaaattactagtatggaacttgatgggtaaagggtagccgaatttttgatattatgaaattgctctccaaagagaccatgccagtttatactctaataaatagatacataggtaaggggtggtgtatgtttctccacacttcggccaacacacttttcatcacacttttaaatctttgccaaactgataagtaaaaaatagtatctattttaatttgcatttccttaatagagcgaggttgaatctattcagacacttcctgttcttagctccagtattaatttttccactgagttatttgtctttttattcttggtttgcacaagctctgaatgttaaagcagtcaggtcaggtgctacagacaatgcttcccagctcgtcatttgtcttttgattttgctttatagtattatatttccataaagaagtttaaaacttttctgtagttcacaaacttcttttttttttggtacttgtatggccacattattatatttaaatctttgctccatctggagtgtattttggggtgaggagtgaggcagaacccatccactgctgcgtgtgctcactgcccggcaggtgcagcacccccacttcctgccttcctgccctccctgctgcaggtctttgctgggcctttcttatcttcctcctggagggaatgttaagctcctgcctcctccctgcctctcatctctgaggatccttcagtttgccctcatgagctgctgggatgttctttctaaagtgtggattggatcatgctgctcctttggtggctcaccacagcttttcagttaaagtccaaactccttatttagaataatttagaaaaagccaaagaacagaaatcacaaatctacaagttgaaaatcttgtatcataggttgctggggagtctgatatctaggaatgagaygatatgtaactaaaaatatgctttataaatctttacatcttgatgaatacgttttttaaaaagatggggagagaaaggaatggaccaagagtttgaaagcctgcatacattaataaccattagaaaaggtcaaattaatgatttgggggaaagtgcctggacccagtcagttttataagtgttctttcaagctttcaagtaaccacaaattttgcatgtgtrtaaataattcaagagcgtagagaaacctgtgaagtgtcaattaatttgatgaagctgcctattcttgataacaaagcctgataagcctagcattaaaaaaaaaaaatgataggcaaatctcactgattaatgtagttgtaagaatcttaaaatgtcaggctagtatagaagtactgttttcaacatgacccagggatgtttagtccaagaatgtaagaatggtttagattaaaactgacaactactgatgctgggtgtggtgaactagattaataatgcccctcttggcacagcgtatcaagatataatgcatatgtacattttacactttcgggaaagcatgaggcaattctagtgagaatccactggaattagcactaaagccacagtctggattctgtcctcccttttcccatcccaaatcaaggacgatacttacctattagcattattctaggaagagcaggaaaaagaaaaaggaactcatagacacattcataaagtttgggatcagaattagtactacctgtgtggccttcaaaaaatcaaatggaataatttagtttcaaacgaccccataaggccaggcatggtggatcatgcctataatctcagcactttgggaggccaaggcaggtgggtcacctgaggtcagcagtttgagaccagcctgaccagcatggtgaaaccccatctctactaaaaatacaaaaattagctgggcatggtggcacacgcctgtagtcccagctactcaggaggctgaggcaggagaattgcttgaacccgggaggtagaggttgcagtgagctgagatcgcaccattgcactccagcctgggcaagagcaaaaactctgtctcaaaaataaataaataaaaataaataaaacatccccatagaggtatccttgcaggcagctagcagaaactagtgcatgttctctgatgcacttttatccaggcttggaaggatacccaaagatgaagttccaaggagtaccatgagtcgagtcagacaaacacgatggaagagggcagatagtagaaytatcagagataggatataaaacaagtacagtaagtcctcactttacgttgtcgatgggttcttggagactgcaacttgaagcgaaatgacttcaggcaaagtggcatataacagtcctggaataatgttgtttcattcaatgtcatttcagtatgattgagaaaaaaaaattccttgctgggacccactgtctgtgtggagtttgcatgttttctcccacatctgtgagtttcctccaggtgcttctgtttcctcccacatcccaaagatgcacacgttaggtgatttggcgtatctgatctgagtggtcccagtctgagtgagagtaggtggatgtgtgtgccctgtgatgggatagtgtcctgtccagggtcagttcctgccttgtaccctgaactgctgggaaaagctccagccacttgagaccttgaactggaataattggggaaatcaatatctttccattaatctttcttaaatgtatgtatcactcacatttattttagtgtttaatattagaagtgtttttgtgtttatttggaagtttgttgacgtttttgtgaccagaaatatgctatgggagcttaattcttattatatcaattagcctagggtaaaatttgttttgttctcagtgttttagtaaagtcatagattccgagaacctgtcgaccttgagcaaggacttactatatattaaaaaataggctgggtgcagtggctcacgcctgtaatctcagcactttgggaggccaaggcgggcagatcacctgaggtcagtagttcgagaccagcctggccaacatggtgaaacaccatctctactaaaaatacaaaaattactattgtgagtagtgctgcaataaacatatgtgtgcatgtgtctttatagcagcatgatttataatcctttggttatatacccagtaatgggatggctgggtcaaatggtatttctagttctagatccctgaggaatcgccacaccgtcttccacaatggttgaactagtttacagtcccaccaacagtgtaaaagtgttcctatttctccacatcctctccagcacctgttgtttcctgactttttaatgattgccattctaactggtgtgagatggtatctcattgtggttttgatttgcatttctctgatggccagtgatgakgagcattttttcgtgtgtctgttggctgcataaatgtcttcttttgagaagtgtctgttcatatccttcacccactttttgatggggttgtttgatattttcttgtaaatttgttaaagttctttgtagattctggatattagccctttgtcagatgggtagatcataaaaattttctcccattctgtaggttgcctgttcactgtgatggtagtttcttttgctgtgcagaagctctttagtttaattagatcccatttgtcaattttggcttttgttgccattgcttttggtgttttagtcatgaagtccttgcccatgcctatgtcctgaatggtattgtctaggttttcttctagggtttttatggttttaggtctaacatttaagtgtttaatccatctggaattaatttttgtataaggtgtaaggaagggatccagtttcagctttctacatatggctaggcagttttcccagcaccatttatgttttccccatttcttgtttttgtcatgtttgtcaaagatcagatggctgtagatgtgtggtattatttctgagggctctgttctgttccattggtctatatctctgttttggtaccagcaccatgctgttttggttactgtagccttgtagtatagtttgaagtcaggtagcgtgatgcctccagcacatgcacacgtatgtttattgtggcactattcacaatagcaaagacttggaaccaacccaaatgtccatcagtgatagactggattaagaaaatgtggcacttatacaccatggaatactatgcagccataacaaaagatgagttcatgtcctttgtagggacatggatgaagctggaaaccatcattctgagcaaactatcgcaaggacagaaaaccaaaccctgcatgttctcactcataggtgacaattgaacaatgagaacacttggacacagggtaggaaacacacaccggggcctgtcgtggggagcagggagggatagcattaggagatatacctaatgtaaatgatgagttaacgagtgcagcacaccaacgtggcacttacatacatatgtaacaaacctgcacgttgtgcacatgtaccctagaacttaaagtataataataattaaaaaaaaaaacaaattagctggatgtggtggcgggtgccgctaatcccagctacttgggaggctgaggcaggagaaatgcttgaacctgggaggcagaggttgcagtgagctgagattgtgccattgcactccagcctgggtgacaagagggagactctgtctcgggggaaaaaaaaaaaaaaaaaaagaacctacttatatataaaaaaattgacaaaggagatcgggcgtggtggctcacacctttaatcccagcactttgggaggccaaggcaggcggatcatgaggtcaggagttcaagaccggcctggccaacatggtgaaaccctgtctctactaaaaatacaaaaattagctgggtgtggtggcaggcacctgtaatcgcagctacttgggaacctgaggtagagaattgcttgaatgcgggaggtggaggttccaatgagctaagattgtgctgctgcactccagcctgggcaacagagcaagactccgtgccaaaaaacaaacaaaaaaaaattgacaaagggataagaaacttgcagaattagccaggcagattgggaagaggaggaaatataacttttagaaattaaaaaaatgaaactgaagtccagtatactcattaaatagattagacatagattaaatacggtgattgggaagaaaggtctaaagaaattgtgctgaatgcagcrcaaagacaggtagaaaatatgaatgagaatttaagaaacatggaagactgggagggtataatatgcccttaattgaaattcctggagataacagaggcaatgtgctagatgcaacgttagagaagataatggctaaaaaagtttctagaacacatgcaaaatatcggtcttcagaaagcctaataaattccaaataagtcaaattaaatccctacttggattaaaacatagtaaattgcagyatatacttataaaatatagttaatataaaagcagccaaagaaagaaatatcgattatctaaaaggcaacagcagttacactgaattggtttgccaacagcaatactgaagggcaagatagatatcagtgtcaaactagaattcggttcccagcaaatacctctcaacaaattatctttccagaatgacagcaaaataaagatttttttttttaatctagggaagctacatgacatgctgaaaagatgtgttaggtttcatatttactcctcacttgtaaaagaaaactaataaactagggtttagaaataataagctctcagagcacagagagcatgttcaccatataatcacatacatagcaggcactcagtaaaaatctatgggaatgttcctcctgccatgagagcagctgtctgccagaagcaggcaggcactgtgggtggtagtgaaatcctagaggcattcctattgaagtgtggagcaaaacatggttgcccagtgttaccactattgtccaatgtggcacctgaagttctactccagaaaaagaatggtgaatacgagaaggaaaacattactaactttaaaatcaatggcatctcctacatatataacaaactaatcacctgaaaaactatcagaagtaatatatacagaaatttgacctagtaagaaatatgacatacctcctatctaggagcttaaaaaccattcctttctaaggttttgttcaaaataccaatagaatatagctattaatatatttcttcaatatcctagtaactactgctgggataaaggagagctaggatggcttctgccctcagggagctctgggctgagtggtaaacggggtggcggacctgttactgactttgttggctgtaatgggtataaaggagcaagttgttggttctgagacgtgtagttgggggaagagccaggaaatgcctcatagggaggtgaaccataaattgaatctgaattcatgatcaaaaggccatgaatttaaagaaaaggtcctcagtgtgaatagtcatcttcaaatggataagtcacgtggtcatctttatatttcataaatagaatgaaagatgttgaaaggggaaaattctggctgggcacaggggctcacgcctgtaatcctagcattttgggagactgtggtgggcagatcacgaggtcagaagttcgagaccagcctggccaacatggtgaaaccctgtctctactaaaaatacaaaaattagccgagcatggtgrcgggtgcctatagtcccagctactcaggaagctgaggcaggagaatcgcttgaacccaggaggcagaggttgcagtgagctgagatcatgccattgcactccagcctggatggcaagaacaagactccatctcaaaaaaaaaaaaaaaaagaggaaaatttatcacttgacagattgtgctataagttaagatcaggaggcttttatttcttgggggttaatcttactaagtgcttacataaacctatcttatgaagaggtgtctgaagaagtctaatcagttccaatctgattctcctaataggtttagttggtatagtagttgaccgtggtgtgctattaattaacaaagtctttttatttttaacttgaattttaagctctgataaaacaatatgattaatcagagcacttgagacatgatctaaaattgatgatttggaactttaaaattttgttactcatctctgtttttcctaagtgaacgtcacagttggagactcattaattctctttctggggacatcaggaagcaccactctgcagtggttggtggtcttctgtattagtaagggttccctagagggacagaactaataggagatatatatatatatawaaaggggagtttattaagtattgacttacatgatcgcagggtcccacaataggctgtctgcaagcttgaggagcaaggagagccagtctgagtctcaaaactgaagaacttggagttcgatgtttgagggcaggaagcagccagcattggagaaagatgtaggctgggagtcaaggccactcttgccttttcatatatttctgcctgctttgtattcgctggcagctgatgagattgtgcccacccagattaagtgtgggtctgcctttcccagcccactgactcaaatgttaatctcctttggcaacaccctcacaggcatacccaggaacaatactttgcatccttcaatccaatcaagttgactttagactacatctccctgtggtacttgtatctttctgtcatcttgccataagctttatttcctcttgcagcccacttgcttcaacaatgtcctttttgttttatgaggaaggcttatcaattttacttcaaatgatttgtgattaactaaaacaattctttcttttctaggattgtagaaatctatagtagaagactacaaggtaagctttaaaaatctgtattaacagaaaacatttttcttttttttctttttttaaatttttatttttgagacagagtcttgctctgtcacccaggctggagtgcagtggtgcaatctcggctcactgcagcctcagccttccaagtagctgagattataagagtgcatcaccatgccttggctaatttttgtatttctagtagagacggggtttcaccatattgatcaggctggtctcgaacttccgacctcaggtgatctgcccaccttggcctcccaaagtgctgggattacaggcatgagccactgtgcctggctacagaaaacatttttcctacacaaaaagtattttttgttttattactagtgcgataagtatgacttataaaaatgtaaaacctcttaggactataaaaagtctactgtttcaagcttccagaagaaatcactgttgtatttgcacattccttcacattttcatgcatatacctgcattttcaaatcaatttatttggattatgtttaaacaaaaatgggctcattttatacataatcagccttgcttttttccctgctttttttcatttaacaaatcttaaacatttttgccacatccatgtaactatctcattcattctggtggctgtctagaatcctaccgtatatgccatggcttggcgtaacctataccagctctgatagatactggggggtttcatcagttttcaaatagatgcagtgctgcaatgaatattcctgtatgaattaaaagacaagtcattttattcaggacaggaactatattatttaggttaaattgttggttttcaacattgctctaagcacaattcaataattggactgcagcccctttgttaaccctgttgcaggctatttatttgctgcactactttacctccatggaggtgcttggtaaccagtactgtgttgttctaactgcacaggtatgagataattgctattctaattccttcccgcagtgatgctggagggcttcagggtgttctgagatctctttagccctgtacttcaggtgagggagttgaatccgggcctctctgtggcccagtcagcagacaaagcagtctggtaaaagctggtgtgtcttggctcttaaatctcacagaagtctgatttttaagatttcaaatgttctagagacagaaaaagcttccagctgtttgtgtcagactctcaaactgagctccttatcacatccacagttcaggagcrccktamaaaacaaattgctgtagcaatcacggaagccttgcggcctgctggagtcrgggtagtggttgaagcaacgtaagtctgcatctgcctttagtaacgtcataatggtgcactagaagtgatcttgctatttagtgcttctcatattttgtagcaccaggtgatgccacacaactgatatgataactgtagatttccatccctgagcctaaagctcttttaccactttcatttactgttactgatataggaacagaatatgggagaagtattttttgagggtaggatggggcttgtggaggcatagggagttaaaagcacaggtgtagagatttgcataatcaatagccttttttttttttgagatggagcctcactctgtcgcccaggctggagtgcagtggtgcaatctcggctcactgcaacctccacctcccgggttcaagcgattctcctgcctcagcctcccgagtagctgggaccacaggtgtgtgtcaccatgcccggctaatttttgtatatttaatagagatggggtttcatcatgtcggccaggctggtctcgaactcctgacctcatgatccacccgtcacggcctcccaaagtgctaggattacaggcgtgagcccctgcgcccagctcaatcgccattttttaaaaatgctcaagacagggtcttgctctctcacccaggctggagtgcaatggtgtgatcttggctcactgcaacctctgcctcccaggttcaagcgattctcctgcctcagcctcccaaatagctgggattacaggtgcccgccaccacacccagctaattttcgtatttagtagagatgggatttcaccatgttggccaggctggggatctcaaactcctgacctcaagtgatctgcccacctcagcctcccaaaatactgagattactggcgtgagccaccacgccaatagccatttttatgtcttctcttgattttatgtcttctcttratttcttctttagctctctgttgctccaagccgagtttttctaatattttgtcacacatttaaaaaataaagccaagaattggtacatttctttaagttaggatgagttaagagaattgcagctgttgtgtggacaaagttcatatgtgttctgtgacgtggtgtgaactctgttctatgtctggtatctaatgtcaccaggttgctcagacaggatctctggtcaccattatctgaattctgcctggtgacatcagtatacttgagcatttatctgaacacctaggctagcatagtgctgtcttggtcctgaaggcagagcaagtgagaattctgactttcttttgatctagaagttaagtaactctgtagaccttttatattactttcaccccagaagaaaattccatttttcccctttttggatgctttaaggatcaactactgataaaaataaaagttgcaagacaacttcaagaacaaaaagtttaggttgctgcaaagataattgcagtttttgccattatgttcaatagcaagaaccrcagttacttttgcatgaacctaatagataacatttgtgtaagaagggatatttcgatatacttggtaactgtgagctgagatttaatctttaggcctgcttttaaaaaccaaaccagcagctgtctactcctttaaacaacctgtgttgccttattttgtagacacrtrtgtrtggtaatgygaggtgtacagaaaatgaacagcwraactgtgaccagcacaatgttgggtgtgtyccgggaggatccaaagactygggaagagttcctgactctcattagsagctgagcttcattcagtgtgtgtgcgttggttgccgatcgtactgccagtagcattgtctgtctgtccggtcttgtttgtacattccattttcaattgttacagatgtgaactttattccttgtcactaattatatttaaaattatttctaggaagtcaaataaatataataaagggttgagccctctactttcttcttgccacctttttgtggcaatattaaagtgaactgctaatagtgtaagyaygtgcacaaaaccactgccagataaccagaggggcctgggaagggagaagaattagtgtatttttttcaaatagtacagtaatttgcctcataagcataggagcattgggaatgagagggaactgtgcccagtatactgttttttttcttcctccaataaaagtggtgtagtgccgaaagtgctaaaatatttagtgcggtattgctctgtgaattcaagttcaacagacttcactttggtcatgtttattaaaccaccagtgacatttaaaaatatatttttagcagtcgtaatgttagtcaccaagggaaggtggtggaatgtctatgtttttgattttactgtgagttaaaaaggcacatttctaccttctattgtttttaaattcaagaatagggaattagttcctggtgttgtttacgagtgtattctcgtgtcaacatacagggatttagacatttaactctctgtgccttgataagaatatcatttagagtgtagatacttttgcctttttaaaaaagccattattttatgagacttagtactcacactgcaaataactagtcagctcagttttaactttataggtttattgagtttcctttgtgtgatccatgtagatgcctcaaaatgtttcttcttcttcttttttttaatcttataagatatttttctaagtatttccagaaacatttgagagtgcccatcattttcaggtctgcagaaccatagcttccacgcacctgaacgagcacagaatgaactgacggtggaagacattatgagctgtgtccaacgttttaaccaaagcgtatcgtaccaacgatctgtgaaaatgcactggaagcttctggtcccggtttcctttgtggtctatgtgggtcttgtcctcattgtaactccgtatagatggtataggtattttaatcctggaagctgttgccttattaatgattatcttaaaatttcctccattggggcagcgtgggccaaattaaaacaaacaaaaccgcaactcctccacagaaacacaaacacagttattccatgaagtttagtatttggttgacatagtgctcttcaaattcatcccattaccctaaaagtaataactttgatgcttgctttaactttagtcccatctctgccactttgatgctatttgggttatgatggggcaagatggcagaggtattgggtttttttgtttttttccattcctctctacttctgtttcctagctttttctttctggagtttaagtacagtgatggttggcttgagtacctttttaaatctagcccagtataaacattagcctgcttaatatttagacatttataggtagaattctgagcactcaactcatgtttggcattttaaagtaaaaacaagtgtgacttcgaggaccaaagaaattgtcagctatacatttatctttatgaactcatttatattcctttttaatgactcgttgttctaacatttcctagaagtgttcttataaaggtctaatgtatccacaggctgttgtcttattagtaaatgcaaagtaatgactttgtctgttttactctagtctttagtacttcaaaattaccttttcatatccatgatcttgagtccatttgggggatttttaagaatttgatgtatttcaatacactgttcaaaattaaattgtttaattttatgtatgagtatgtatgttcctgaagttggtcctatttaaattattaaactattgtaactttgttcttgtgaaagttgtttctttttcaaccaccactataaatatttaaataacttgattattttggctgtattctgtttcagcaaagacatcataagggcttctcccagccatcaaagctatttgaatactaatctccattatagtacgaagtaaccccaggttctgacagtttctccttggtatttggttggagtcttaccgtcctcactgtcttgaggtaatgggaggaggaggtctgggataagagtcaggaatctgagtggccctcatgtccctgttgtcttaatgcttagtaggtaacttcagccccctgggaactggcactgtttcctacgtgggagctgttggggaaggaagagtaggctggggcagggagtggaaaagggtttccttccctcttctaggaagagcctgcccagggcaaaacttccagttagtgcaaggggttttgtgctgctcttctgtcccatgcccaacaacctcctttccctcttgctaatggtctcctccccattccgtgctgcccacaggcagaggccgcccctgccctcactggtggccagcatgtccaagtactggggcctgctgctccttgtgggaccctgtggaccgttgggtagcaaatcttatcaaagtaggaatgcttactggcataaaacattcctagaaccaccactcataggtgtcaataaaacgatgagctgctcagctaagcccgagttgctgcttctgagttttgtcaccgaagattgattggccaagttccttttcacttagtggaagagcagttgcagacatgaaaggttttcaagaagcctttctgtcaaaacagagcacctggattcatcatcacaggcatgggtcctcctgctgatggagagaagaagaagtctcaagagatcaaggggaagtgtgagtacctgactcctcaccctcccagaggcccttgccttcttttaatttttgttacagaaaatgaaacatgcacatcagtagagagatgagcacatgaacccctgtgtactaatcacccagcttcaagaagtctcaactcaatggcgccatcttgttttcctctatacccatctgaccagattattgcaaagcaaatcccaggcattatttcatccataaatatttcagattatctaaataaagtggaatcaggtaaagaaatatatgatcaaatacatccattatcacactaaaaattagtgtcaattcaaatatctagattttcccctactgttgtgtagtttttagtagtttatttgaatcaaggtacaaacgagatccacacattgcaacaggttgatttaagtctcttaagaatcttatatgttctctttccactccctcctctgttttccttaaaatttatctggtcacttgttttggagaagccccgtgtttattccaggaactgtctggttgctggaatgtctgtggctgtccaaatgaggtcaaactccagctaaacagggaaaagaagggttctttgccacaacacttctccacgtccctaaacccctactcctgggcagcctagcttggtctggttctgtctggcttttaactggaacatagctctccttggctttgtaacttagagccattccccaggtacagaatagaattcattgcttttttctgagtgtgtcctttttgggcaaggcttccattttaaaacatgctgcctttggcttcagcttggtggattccttggctgccaagattttggttaaggtggaaaggttattacagaagtgaaaacaatgaatctcacagtaattggcatcactttgagggcctacccatggggaattccattgggttggacagtaggagtacttgggtttcttccccccggctcctcgacctcatcaattacattttcatgacatcctgagtatgaatatcaggctctggccgacaaagggtggtgaaggaagacacactgcgtcttgcatttaagcagctccctttattccctccctagcagtgcagctatgacttgcttgtgggtcctggtaggataactcctggcacctgcattacacagccctaatgcacctatccacttttcctcttatttctacattctcctgtttgttttgagcaatatgtccacaactctgaccttttgagaaatcctttcaatctggaactgactgtgctgcccagagaaatgtggtttggctgccggtgagcattgggaaggttgtgtggagggagtcctgtgatgaaatgcctgggtgtgtgtatgtacaacttcctctcaggctattgattttccctgattttagaatgcattttttattcttcctccttttcctggatcctttcacattcaaaaatgtactgaacaaataaatgagatttctttttttctaatttgtttttttgtggagtttcccattatatgtgtagtgataatttttacagtcattctatctagactgacaaaattctttatggaaacttttctctttgcaaggacattttacttctaaaaccaagggggataaaccgaattaaaaaaaaaagctagtaaataaaaatcagcttaaaaccattctggttctatcagggacctcagaattattggtccgtattggtcatctggtcattggtctcctagcagctgctcaaccagttttggctggaggtgggttttggtctctgtctctctttggcttcactgctgccagcctcaactgcgttcctgattgcttgggaagaacggcctttgacgtctgtatctggacagatgacagtctcttgtgggcccacacagtggcttccgctcctctcaatttgggaaattttaaaggaatttccatttgcagattgaacaagtctaaccagagagaggaagcaacctgactgtttcagtttgtacctttgaactttcaagtacctttaaccaattagagacaactaatctttcttttgctctctctttttttttttttggagacagagtctcgctctgtcgcccaggctggagtacggtggcatgatcttggctcactgcaaccttcacctcctggttcaagcaattctcctgcctcagcctcccgagtagtggattaaagatgccctccaccacgcccagctaatttttgtatttttagtagagacagggtttcaccctgttggtcaggctggtctcgaactcctgacctcaagtgatccacccgccttggcctcccaaagtgctaagactacactcagctcaaagtgctgagccactgtgcccggcccaagacaactaatctcagagcaaaatttcttgcctgaagtctcatttctgaaagttgatttgcatgtgatcaaggagtatttgaagtcttatccaaatcttagctgaccttctcttgcttaacagttgtcagaatcacctcttaatgaaggggttggtggagtcagcacttgactctaacagaatttccatataaatttaatatatttaaaaaataattatgaataaaaagtatcacgtgcacttgaagtatagacaagccaacaatgaattctcattgtctttttaactagaacacacacaaaacaggacattaaaatcaacatgaaaccctgagctctgagaactcataatttgtttcctgcattttagtgtttgggggatggaaaacaaatcttccagattttctgtgtgtgtgtgtatgtatgtgtgtgtgtgtacccaacaccgaatctggaagacttgttataaggaagaatatatattttttctttctttctttttttttttttttttttttttttttttttgaggcagtatcttgctctgttgttgctcagcctggagtgcagtggcatgaacacagctcactgcaacctctacctccctggctcaagcgatcctcctgcctcagccccccaagtagctgggactatagacacatgctacagtgcccagctaattgagtatttccattttataagtgagttgggtgtcagggagggtcaaatgatgtgcgtcacccacactgggttaaagaggtgatgttgctccctggactctgcttctgttgacctttctgttaaccagtgggcccagccccttaggttacctctggctcccattgtagctggttaatcttttccaggtgccctctgtcactctgtgcccccacatatttgaagatgtatactatcacctttgccctttgaactcaaaggtgctgctgggagtgattataggagtgtgagatggtcaccttgtagttccatgtaatcacactgtcttaaatgctcaaattaaaaaaaataaataaaaactggtaattctgtggttagcacaaaattcaaacatcacaaaataattaaggaaacatttaccttcacctctgctcccaagtaagccaggcagctgctatcatcagagatatttaatgaaattctttactttcatggcagaatgaaaatctttgtctcctgcatgtaggctgactttatgtacttcctaatggtagaaggtgtaactctaaactggtgaggagtttgtgtaactatcagaatgtaaaatccattatgtttattctggtgttctttcaaagtcattagatgctttctctgaattttttttttttttagcaaaatcatctgcaaaagaaaaatgtgtcctcyttacagaactttgaccaccttagcaaaagaaaagcagattctggcaaactgagtgtttcaagcaggggctcttttaaaatttgtttttttctttcacttttcacgttatttgaataggtaatatatgcacttgcatataatgtgaaaagcacaaaaggatatgccttgaaaagtctctctccctttccatccccagctgcccagttcttttccccaaagccaccactttaccacttttttgtttgtttgttttgagacacagtttttgctcttgttgctcaggctggagtgcaatggcgtgatcttggctcaccacaacctctgcctcccaggttcaagcggttctcccgcctcagcctcccaagtagctgggattacaggcatgcgccaccacacccggctaactttgtattttcagtagagactgggttttaccatgttggccaggctggtctcgaacttccaacctcaggtgatccgcctgcctcggcctcccaaagtgctgggattacaggcgtgagccactgcgcctggcccactttaccactttcttacatatacttccccaaatatttaaggcatatttacacacacacacacacacacacacacacacacgcacacacgtttatttaaatgagggactattggccatgtgtgcctatccaaatcacctagggaacttttagacaatgtttctgtaccctgtgaggaactattcagtatttgtaattatagtttgaaaaagaaaattgcccttggttattctggtgggctccctcagttaagaatgactagcctaagatacaaaaattcagacccacagaacccaacaggaagccagtagctccttcccaggcaatttgggcaggagaacagctgtgtggatcactctgtgaacaatcgtttctatcgtccctggttaagggcatctgcaaccactcagctgataagtctaaaggtaaattgtcccttaaaagggactgtctccagattaatataatcactgctgcaattgcctgtgtataaataacttatttctctggtctgatacctctaaacatatcctacttttttcctcctccatctcatttttttatacttgttaatcatagaaaacttagaaaatgggcaggcacagtgggttacacttgcaatcccagcactttgggaggctgaggtgggcagatcacctgaggtcagatcacgtgaggtcaggagtcaccagcctggccaacatggtgaaaccccatctctattaaaaatacaaaaattatctgggcgtggtggcaggcacctgtagtcccacctactcaggaggccgaggcaggagaatcgcttgaac

SEQ ID NO: 95076 - DNA, 13065 bp, Homo sapiens
aaagagaaaatgaggataggagaaacaagggaatctcagacaaatgagtacacatgaaagatgttggccaactgttgaaatgaaacacagtcgtcatcgctaccactaatgcaactaatagccactgctaaaatggtatagttaacacaagtgctagtaccattactattggaaaccatcgagaatgacaattatggcttgcgttccattccaagtgattcatattttccagttgtcaggtcctgcagagatagaccctatctcccagaaacaataaaattaaaaacttgaagttcatcttccattcacaagtatctatttccaataggcagcttttacacttggttatcatttataattttcttagtggattactgttattaatactattgttattttcattattactcttattgtcaaaactctgatgactatggtgtaacacataatattaaagtctgcaggccaaatatattataaccatattttataatgttacagaaagagcctaagacaatgattttggtcttcttttatttaaatcatatcagcatagaaaaagaccatgataatcttccttgttatcatgtacacttgcaaaaattctctccagaacaagacacacttttttatgaaatttacattttcaccagggaaaaatccactcataaccatattcattatgaatgtgtactctaagaaagtcatcacttggaaacgagagaatctatatccagtgccggtaattcccagacccgtttttaaaaccttctgaccccaaaaactacattctaattagcatcaagcacaactaactgccagatatcaatatgtgtgtaactacccacatggctgagattgtgcactgtggaggcattgagatctgggctcaaatcctttctcttctaccctgtttgtgggacacattacttaacctcttgtagcctcagttgtcttgtagtaaaaatggggctaaagtaataactacaactcataaagttgttgtagggattgaatgagataatgtatgctaagaggttaatatagtacgtgtgtgagtgtgtctgtgggtttgtgtatgtgtgtgtgtagagagagcactgaaaaagtgtcagttacatctatacacgctattttcctatctaaaatttaaaatttaagataggaaaaattcaacttctaggaatttcttatttatttatttatctatttaataaaaacatgtattgcttatatggtaggtactgctttaaatatttttaaagtttacttaatctttataaaatttaaaaattttttgtattttttagagaagtctttgtacctcatttgatgacttattttgtgatattgtagagctgctcatcaatgccagtgtttcagtctcttggcgtttggaagttgaggcatatataaaaccacatattaagtgccctgggccagtttgatatgtgatatgtagagtgaacctattgctttgtaaggtgaatactcattatttccattctaaaattccagattgtcatataatggactttcttaaaattgtctttctagggcagggttagcagtttgtgaaactgatcgaagcaatattctaaaatctctgcatctgttgttttaatttgcatctgatagtggttgagcatcatttggtgtgtttatttggcagaaagtttcctcttccatcctcttccaaaggatgggaattatttgctcccatcctttgctcatttttttattgaatagcttgtcctaacattatttaattatttaatttaatttaattaattagtgttattattttaatatattttacagatttattatatttatatatttaaacattttaattagtaatcatttaatattttaatattattgcttgcaacagttatttaactgttgatactaatccttaatttatatcatatataagaatatatcttattgtatataaaatatctcttataaaagtaattatgttcattttagaaaatgcagaaaaacaaaagaagaaaatattttttcatataatttccacagctaggaatatcttgatgactatcctttttagttctttttcatgcaaatgtgtatgtgttttttaatatgttttataatctgacttttcttattatctatatatcttgcacgtttccatgttactacttatctacaatataattttagtttctggatagaattccattatattgctgtaccataatttatttaataatctatatttagacaattttggcaattttttaaaaaactacttttgatgcaattgtattatttaatttaaaaaaattttttttacagacagggtctttctctgtcatccaggctggattgcagttgcatgatcatagctcactgcaacttcaaactcctgggctcaagcaatcctcctgcctcagcctcctgagtagctgggactacaggtctataccaccaagtccagctaattgtttttttcatatttttttagagatatggccttactatgttgtctaggcttaattacttatctaatatttatctcttctgttagactcatgacttttaccctttctgactgcagctcaggataagaagtacatagtaatctgtgacccagcactcacctgtgtatctgacatatgcatgtgacacacatataagtggaaaaaagtcatgaaacaaaactcactttccggtgatttctgttcatttcaatatcattaaaatttttttctggtcacaatctactaaattatttcatgatccacagatgagcttttaccctcagtgtgaaaatcagtgcctaagtcacttgttccaggggaacaaaggctgcgcttggcacacaggagacattaatgcatttgtattgaaggaacagctgtctcgaaatctttctgttcatccgtgacgactggttaagcggtataatgtatggttacctctaaggtagaagtagacttcagagtctatctgacttcagaagtcagaccgtaagggtttaaatactggctctgccatgtactagctggtgaccatatgtaacttacttgacctctctgtgccttattttcctcaactataaaatgaggataataatagtgcctaactcatgggattgttacgaagattaaataagtaaatttaaaaaatatttaaagcagtacctgccatataataagcaatatatatttttattaaataagtagatgaataaataaataataagaaattcctagaagttgaatgattagatcaaaagatacgtaaaaacttaaggcttttgaaatgtgtaggtaaataccacccatccctccctcctctgcttcctgcaatatttgaaccagcttttattcctaccagcagtacagacttgtagaagtgatatcctgtggtgatattccctgtttatcacttacctgaggatgtttgggctggttaagagttagagtggtagtgactcaagtagtgcaagaagagaggcctcagccagttgctcatgaaaagaggcattgaggggatgcctgtcgacactggacagaactctctggcagcatcagggtaggtgaaacctcaggggtactttgcagagggaatgggaggatctagcagatgccagggcagtaagactcacaggcaaacactcctctccagggcacgtctttcttactgccatagtcgctactctgccacttcttgctctaaaatcctgtctcaaatctgcaagtaaatttctaaatcctatttagtctgtgtagataggttgctttgtgaaaagcaggcgtcctcctgaactactcacactcacggacacatacacacagcctgttgctttctgttttagtatttggagaaatacgtattcaattcaagttccaacttgtctgcaaagtctcccctgacaacttcagcccaggtggatctctctttcctctgagctttcacagcaattttaggcagtaccacagtatttagtacttaattatacactgtctggttctggaattgtctcagggtgttagttgtttcccccaactatagggtaagttctttgaaatcaactgccatgtcatatttcttttggatcccttgttggcttggcatgtagtaggtctttagtaaatggccaaagatcagttgattgatccaagtgtacatcgtgtgagatttgcattgaaataaaattacatcaagaaagatgtttgccatactttacaactttcataaaataaacccaaaatagagcaaatattaaaatattttaaaatcaaacaataacactactagaataaaatatgtgtaaaattatttataacagtggaattaatgaaatgagcccagcctttctaaacagaatgcaagcctggaagccattagaaatgatggataaatttggtaacaaaaattttaaaacttttctacggcagacttcgttgatttataaggatcttgtacaaatcaagatgatgaacaacccttcgtctccccaacccaaattgtaagggggtgaaaaatggctaaattttctttccagccttgtccttcactcgtctacaaaggatctttcacctcaactgaggatcttgatcccgcaccttcttcaaattctgtctccttagctatgtctttctcctttcttcccttatcaattttcctttatgctctgaatcttgaattttcaaaaagtaagagactttgtggtagtgttttaagaaaagaagagctttctttgaacttactgcagttggcagaagtgttagcaagtgactttcagtgggcatcccagccacttacgccttggatatatcagtgtccaacactgcatggttgtcagtggttaatatcattggctaaatgttgtgtggctaacttttcctgagtagtgtgctttacccaaaagtcagtgtattaggtgctccactgaaaaaggctattattataacaccacagcatgtaattttggaaaacttggaatatcagaaatcatatgcaacacttcactttagggtgagaactacagcatatgcaagaaagagaaaatcgtgtcaatttttaaatgtttgctttctagttttatttttattcagaataacagaatcaaaacaggaatgtgtttttttttttcttatcgccaagagaaaactcaagtcttcctagtgttaccaagcaattgaaaaagagctactgttcatagagaagatgctcaagacagaggtgaatagatgagctctgttggatgatgtttttgaggatattgttaagaaggttggtgtataaataaggaagtcactgaaattgatctaggttaattttagtttctttcagaacccattaaaaagcatcattgtttatcaagtggaaagaaaagttgatagtgagagaaaagcttatcttttatagagtataaactattacaaagaataaggaggaatgaaaactatcaggttagaatacctgagagtgttcccttagaaatgccaaagtcctgacattctgattatttcaaagagcgatgaaaatatataaatgtacaaaagtggatgcctttgttttcctttggggatctttcagtatatcctggaaaatgtagttttctcaaaccatttttattcaggaaatttggaaaatttttttttttttttttttttttgagacagagtcttgctctttcgcccaggctggagtgcaatggcgtaatctcagctcaccgcaacctctgcctcctgggttcaagtgattctcctgcctcagccttgtgagtagctgggattacaggcatgcaccaccatgcccggttaattttgtattttttttagcagagatgtggtttctccatgttggtcaggctggtcttgaactcctaacctcaggtgatccccccacttcggcctcccaaagtactgggattacaggcatgggctaccgcgcctggctggaaaataattttttaaaatcataaatatcaccgactttcagcagggctgcggctaccatgttctctcatgcgggcatcactgggctgttggcctggaccttgcagccacaatggattcaagttcgaaatacagcaacttcgaaagatgttaccaagcgactaaagtccatcaaaaacatccagaaaattaccaagtctatgcaaatggtagcagcagcaaaatacgcccaagctgagagagagctgaaaccagcttgaatatatggattgggatctttggctctggagaaaaagctggtatcaaggtgcctgaagacaacaagaaacacctccttattggtgtgtcctcagatcgaggactgtgtggcgctattcattcctccattgctaaacagatgaaaagcgaggttgctacactaacagcagctgggaaagaagttatgcttgttggaattggtgacaaaatcaggggcgtactttacaggatgcattctgaccagtttctggtggcattaaaagaagtgagaagaaatccccctgcttttggaaatgtgtcagtcattgcccttgaattactaaattctggatatgaatttgatgaaggctccatcrtctttaatcagttcaagtctgtcatctcgtataagactgaagaaaagcccatctttttccttaataccattgcaagtgccragagcatgagtatctactataatattgatgctgaggtgctgcaaaattaccaggaatacagtctggccaacagcatctactactctctgaaggagtccaccactagtgagcagagtgccaggatgacagccatggacaacaccagcaagaatgcctctgagatgattgacaaattgacattgacattcaactgtacccgccaagctgtcatcacaaaagagttgactgaaattatctttggtgctgtagctctggattaatgaaaatcaagttccatcctcagacaaggggtaaagaaggaaaattcagccagctgattttgtttttagcttactgttgtctttgtcagaagaaagtgttcctccattgttttaattactgaagacagcaagataagtgtaaattattttacaataaacaacttaaaatcataaatatcacttatcttcatgcactcgtatgcaagttgaaaggcagtatttatatggtacattttgtctacagatgtggagactttaaaaataataaaatcccaatttgctgaagaaacagacacaagcatgatgtgtcatgtgatgagtctcaggtgaaacctggcaatgatcctactaaatcccgggccatttttcaaatgccaaagtgagtttctgggccacagattagccagtccctttaacgattattttcatagggttccattcattttggttaatgtaaacactccattatttttactatttggaaggtagatgtattaataaaaattgaaatctgatctatcatctctatttaaaagtatttaaaaatacttcaatgtggcattctgtcaattgggaggtaagtggagttcatgaagcccaaaggggaacaggcttctgttcccgtgaaggtccacaagcctacaaggcatggaacagagggacagatgagagccacccatagcacacaagccacagagcaaggctatgagttttttcaggggaagttcattcttacttcaaatcagagcatggtggaacagaaaagactcctgctgtttaaggatttatactctggcaaatgagatacatatcttgacaatagttaaatctttaaaaggaacagatacattaaaaaatggaatacaaacaatggaaagtgcttggtcgggcgcggtggctcacgcctgtaatccccgcactttgggaggccgaggcaggtgaatcacgaggtcaggagatcgagaccatggtgaaaccccgtctctactaaaaatacaaaaaattagccaggcacagtggcgggcacctgtagtcccagctactcgggaggctgaggcaggagaatggcgtgaacccacgaggcggagcttgcagtgagcccagatcgcgccactgcattccagcctgggcgacagagcgagactccgtctcaaaaaaaaaaaaaaaaaaaaaaggaaagtgaattagtaaaagagtaaagtcaatggtgttatttatttaaataaattttactgagaggaatcaaataactttcttttgattgatccaggagggtgtcatagttggagagagattttggaacctagcagaagagtaagaaaggagtggtttgtttaagattcattgctattaaacactttgtgatctgactttttaaagtgtaaataggagactattcttttaaaaatacaagtaagtattgcttgaatctatatcgtgttaaaggtagttttcatgttagtttaaaaatttgctcatgaacaaatttgtcttggtttgtagtcacaatttaagcagttgtttgtgttgcgtgtggaaggactctacattctagcacaaaagaggataaacatgttctagggattgctggccatctagatcagcaatctgactctcaccatccaacctttctttggtcattgaagaggctacagtgttgtcacactaaggctcagggactgagtaggtgacaaaactcagaactgggccttgggtgtgacctggcccaagggctgcttaaacaataaatggagttcaaggttttccattgccctacccaagaagctcaggtcagacctgaaacttctgctatatgatctacataccaagatatgtggttacaacacaatactcattgacagctttcttacttattttagggtgggttccctaactagggatttcaagactctcgaggaagtcagcaaattccttgaaattataagcaaaatttggtgaagagatgagcatgtgtgttttccttgggcacaattcatcagagtctcaaaggaattgtaatctcaacaaaaatgagaattacatctctagaatggaaaaattctctactgttttcctaatgagcaagagtgtataatttctggctacttctttttaggagaattaagctgagcaatttaaaacatgctgtggtttaaatgtgtccctcaaaagtttgtgtgttagaaacttggtccccagtatagcagtgttgaggggtgggacctttgggtgatgattatgtcatgaggactctgcccttgtgaatggactgttaattagattaatggattattgagggaatgggttagttatcatgagagttggtctgttataaaagccagtttggccatctcttatgagtcctctcaccatatgatgccccgtgttgcctcaggactctgcagagatttcccaccggcaagaaggtggtcaccagaagcagcccctaggccttggactttccagtatccagaactataagaaataaatttcttttctttataaattacctagttgcagatattcagttatagcaacagagaaaagagtaatataaaatttcattgcattttcctttttatataatttttattgcatacaaatacaaaacagtatttttttaccttgagttaatcttctcatgtcaaaaaaatatgtgtgtgagttagttcattgattgcaaatgaaatgccattttaaaattctgttaaaatggaaatgccatgccatacttcaacattctatttagattctattttaaccaaaagatcttaaagtttttctcagaaggtaatgaaaccacagccccctcccaacccatctttaggaaatacaaagtaatcaaactttttataactgaaaagtatattacaactctagttaaccattttaaatgtttttctttaaaagagataaataacaagtcaatggaaaagataaaatggaattatgaaaatactcaattaaacttggaaaaagcagaaaggagaaaatagaaactaaagccaggcatggtgggtcatacctgtaatcccagtaaatgggaggctgaggcaggaggattgcttgaggccaggagttcaaggctgcagtgagccactgcactccagcctggtcatgacagagcaagatcctagctcaggaaaaaaaaaaggggcaatgaatagaaaataactagcaagatggtagagtttaatccaatgataccaatataccaataatcactttaaatgtaaatgatgtaaacacaccagttaaaagacagagtttgttagattggataaaacagcaagatccaattacatgttgtgtacaacaaacccactttaaatgtaaaggtttagatcaaaaagtaaaaagatggaaaaagatataaaatgaaaacacaaactaaatgaaagctggagtaagtacactaatttcagatgaagtagacttcagaataacaaaaatgatcagggataaagagaaactttacataatgaaaaaggagtcaattttcccaagaacatacagcaatcccaaatgtgtatgcatttaaaaatagagcttcaaaacagatgagtaaagaactgacagaagtaaataaacagacaaatactatgattataatggcagtcttcaacacttctctcacagtaattgataaaacaagttgacagaaaataactaaaaatatagatgggctgggcatggtggttcatgcctatagttccagctactcaggaggctgaggtgggaggatgacttgagcccagaagttcacggcttcagtgagctaagatggcaccagtgcactccagcctgggtgacagagtgagacccccctctctaaaaatttttttttgattttaaaattaaaaaaaacgagacctaaacagcattttccagtaacttgacctaattggcatttatagaccactccacccagtggcagtagaacacatattcttctcaaacacacatgaaacattcactaacataaaccatattctgagctataaagtaaaccttaacaaaattaaaagaagggaaatcacattgtatttattagtctgttttcccactgctgataaagacatatcctttatctgaggaaaaaaggtttaatggacttacagttccacatggctgggaggcctcacaatcatggtagaaggcaaggaggagcaagtcacatcttacatggatgacagcaggcaaagagagagcttgtgtagggaaatgtccgtttttaaaaccatcagatctcgtgagactcattggctgtcacaagaacagcacaggaaagacccgcctccataattcaatcacttcccactgggttcctcccatgacacatgggaaatgtgggagttacaatttaagatgagatttgggtggagacacagccaaaccatatcattccctccctgacccctcccaaatctcatgtcttcacatttcaaaaccacccttgtcctcctaacagtcccccaaagtcttaactcattttgacgttaactcaaaagtccacagtccaatatcttatctcaagtcccttctgcctataagcctgtaaaatcaaaagcaagttagttacttcctagacacaatgggggtacaggcattgggtaaatacagctgttccaaatgagagaaattggccaaaataaaggggctataggccccatgtaagtctgaaatccagcagggcagtcaaattgtaaagctccaagatgatctcctttgactccatgactcgcatccatatcatgctgacacaagaggtgggttgccatggtcttgggcagctctgcccctgtggctttgtagggagcagcctccctctcagctgctttcatgggctggtgttgagtgtctgcagcttttccaggcacatggtgcaagctgtcggtggatctaccattctgtggtctggagaatggtggccctcttctcacagctccactaagtggtgccccagtagggactccatgtgggggctccaaccccacatttcccttccacactgccctagcagaggttctgcatgagggaaccacccctgcagcaaacttctgcctgggcatccaggcatttccatacatcctctgaaatctaggcagaggtttccaaaccccaattcttgacttttgtgcacttgcagactcaacaccacatggaaactgccaaggcttggagcttgcaccctctgaaggcatagcttgagatctatgttggtccctttcagccatggctggagcagctaagacacagggcaccaagtttctagactgtacacagcagagggacccagggcctggcccaggaaataattttttcctcctaaacctccaggcctgtgatgggaggggctaccccaaaggtctctgacatgccctggagacattttccccattgccttggtgataaacatttaactccttgttacttatgcaaatttctgcagccagcttgaatttctgctcagaaaatgggattttcttttctatagcattgtcaggctgcaaattttctaaacttttatgccttgtttttcttttaaaactgaatgcctttaacagcacccaagtcacctcttgaatgcttttctgcttagaaatttcttctgcaaattccctaaatcatctctctcaagttcaaagttccacaagtctctagggcagaggcaaaatgccatcagtctctttgctaaaacataataagagtcacctttgcttcagttcccaaaaagttcctcatctctatctgagaccacctcagcctggaccttattgtccatatcactatcatcatttttgtcaaagccattcaacaagtctctaggaagttccaaactttcccacattttcctgttttcttctgagcccttcaaactgttccaactttttccgttacacagtttcaattttctggtatcttttcagcaacaccccactcctggtaccaatttactgtattagtccattttcatgctgctgataaagacatacctgggactggggtaaaaaaagaggcttaatggacttacagttccacatggctggggaggactcacaatcatggcagaaggcaatgaggagcaagtcacatcttacatggatggcggcaggcaaagagagagcttgtacagggaaactcctatttttagaaccatcagatctt

SEQ ID NO: 95077 - DNA, 27671 bp, Homo sapiens
ggacgctcacgtggatagcttagtgtttcttaagcagtggaaaattgaccgcaaaatgctctaattcgcaatgttctgctttggctgcgggaggcgaggcccgcctcaaggcctgggcggaattctcaggcgtcgctccgccctggtccactgaatggacttccgcctccgttgccccccgaccccaaccccgacactgcccgccgcgccccctgtcctgtggcccgttttcggtcagtggtctccccacctggaatgatccccctactttctgacgcccccacccgtggctcctccatcacaaacagcctccttggcccgctactcgccttacactggccgagggtcgcgcaggatcaaggtggggagagatcttggtgcgatttccaccctcccctttcccgagctctgagccgagtttctccccaccatcgccactttaccctcacttcttgctcctatctctgggcagccacttcccctactaagttaaagtcattgtgctttgcatctgacaaggtcattgggaaagacagcagactagtctctacagggacccttcccggaaacccaggctgaagactcggggtccaccctccaccccagcctgtcacgctgattacaagccctgagtctgggcatcctcgcacagcctcaggcaggcctggctccaaaggggctcacagagaccaggaggtattttcagagctggagggggaatggcagtgggttcaccctatcctctgagggcaagcaggacaaagtgctctcgggctgccaggaagggcatggaccaacttagaagcggggcttacgcaagctgggatgtaggccaccaattccctttccatctttagcatctggggtccccaaggcggcctggaaaggagcacaggtccaggaggagaagtggggagacccaggcccccctatgctcattcaaggaaaaaaacttccttctctaacttctgagggctcttagagcctccaaggctgctcagggccccctcctgtctcatgttggggaatttaatgcagaaagtgacaagtgtctgtgccaccccttcccccctcatttggttttcttgagtttgacaaaaaaaaaaaaaaaaaaaaaaaaaaaaaagaacattatgtcaggtctggaaccaagagtagggagaggttttcgggccccaggacaagagccctacctgcggcccatcccagaggacagccgtgtggctccgtgtggcagccccttcccttctgtacttccagaggtttcaaccagtgctaactggtgagtgccgcacaggctactgtggatgcaggtgacgagggagaaatctgttgtccccctctgcagatgcatttcaaagtgaaatgaagtgattgctccatgtaattaactattgggacacacagcaaaagctctgaaatgactcagccaattgtctccagatgcggttggagaggctgcgattgtttaactctctttagctgtgttggggctcccaatagcccagcagacaagggcccttcagaggacaaaggccgggactscagcgagtgcatcaatgctgacctggcccagctcggggagagtgaattcagaaagacccccattgccctggccttttgtgtttctccccagctggctctaatctttaartatttacccggcccctttgtgcatatatgacttgtgcactttgggctgatggtgctcataaattacatatcgtttacctgttttccagcctagagagagggagctttcattcctttagcctggaatggccagaggaggggaaagaaaacttttggatgacagggattccctcctgggaagagctgcggccacactggacaggcccctccctgcggccctctcagcttccatatggacaggggatggggcagaggcctgtgaatgactgggagctgcaggtgattaaaaaaaatcaccaatctggccaggcatggtggctcactcctgtaatctcagcactttgggaggccgaggccagcggatcacgcggtcaggtgttcgagaccagcctggccaacatggtgaaaccccgtctctactaaaaatacaaaaattagctgggtgtggtggcaggtgcctgtaatcccaactactcgggagggtgaggcaggagaatcgcttgaacccaggaggcagaggttgcagtgagctgggatcgtgccactgcattccagcctgggcaacagagtgagactccatctcaaaaaaaaaaaaaaaaaagagaaagaaaaagaagcctaatttcatctcggcctggagtttaacttggaaatagcacagtggttctcagggttctctaaaacaggaggtatccacactcgggtcccagaaataaagccacctcagcctgtaggcggatggcaggaaggggagggaagggggaggttgcagagggaccttcctgcatgagaaagggctccctttgtgcctgcctcgaaagctcctagaacaaaacacattcaaatgcttatttacaagaaaagtcaagcaaggcatcccaggcagagcagttttccttttttttcttatatttttgtaggtgtgttgtccccaagcatggagggctgggtgcacagtgggtctgtttgatcagattgctttcctctgtggcgggaaagcaggtccctgcatggggtctgcgtgtttctgtgcatctccgtgtgtgtgtttccctgtgtctatgtgcagccctctgcatgtgactttgttcctctggtttgatgcccatgtgtgcttagatctgcttcctctcctttctcctccatcactgctctgtgaaccctgggccctgacagattcggcaactccagcaacttctgaaaattctccttccctggagtccggccccacctgggaggagactgctgcctctcccttctttctcccttctccaaaatggggctgatgaagagggaggggmcaaggggaggtgatgggcagaggagagagcattgctgtggttctccagtctggttacatattactctacaaccccgagtggcaacagtccctgggggtaaatcagggctgtcatacattgaggagagcagaagccaggaagggcttcccaggcacagtgggttttggccccaggaccagctcccttccaggggtgaaggtgcgatgagtgccctctggtggtcctgaggtgtcctggagcagagggagatgtcctgagtctgtgggagaccacaggaaactggcgacagtcacaggagctctcagctcccaggaacattcacatccaggcctccttcccatgtggcactgcagctgagtgactttgatttttaaaacattaaatctcttttcaattcccatccaccaagtttagcacgttttctgagcaccgtttaaacatggtactggagctaggcgcagtggtgcacgcctgtcgtcccagctactcaggaggccgaggcaggaggatggcctgagcccaggagtttgaggctgcagtgagctatgatctcgccactgcattccagccttggcaacagagtgaggccctgtctcaaaaaaatcaataactaaaataaaataaagtggtactgggctttacagaacaaataccaatctgtgccagagaaataaggatccccactgtacaggaaatggaggtgcatagaatggatttgccaaggtcacaaagctaggccgcagaggtgaggggtccgggattctggcccaggctctccatccagcttcccaggtaccagagctcctgccaggacctgcagggacaagagtggagaggggctcagatgcagggctcacagaccgcctgcctctctcgctgacccaccacttgatgccagcctccccgagggcctgtccccatcccttctcagcctttctccctcccgcctctgtgcctttcaaacgccaagccctcactccctccttgatctcatttccaatggagggcaggctgtccatccccaagggccccaaggcctagctctggcgtctgttcctcgcagcctcctcgccctgccgccctccaagctgagggcctcccctggggtccctctttgctccccatccttgctctccttctgcccccactgccacccctgcagagtttattccagttgttcacttactggcttttctcctccagcgcagctctctgagctacctgaggtgagagaatttactctttaaaaagtaaagaaaaacttgattataaaagtaatctatgggccgggcacggtggctcatgcctataatcccagcagtttgggaggccgaggcgggtggatcacctgaggtcaggagtttgaaaccagcctggccaacatggtaaagccccgtctctactaaaaatacaaaaaaattagctggccgtggtagtaggctcctgtaatcccagctactcaggaggctgaggcaggagaatcacttgaacccggaggcggaggttgcagtgagccgagattgcgccattgtactccagcctgggcaacaagagcaaaactccatctgaaaaaaaaaaagtatcctgtgttcattgtaggcagtatggaaactgcaaaaacagataaagacaataaaaatcaccaagagtgccactacctaaagataggccaggggtggtggctcatacctgtaattccagtgctttgtgaggctgattggaggatcacttgggcccaggagttccagactgccgcactccagcctggccaacacagtgagaccctgtgtctaaaaaagaaaaaaagaaaaaaaaaaggtacatatatagtcggcgttataccattttggctgatagcttgatcattttcccaggctcagatacctgccctttttccccaagtgaagtcaggatcacaccgaaaagctttgcctcctgctatttaaaaacctaatataggcagggcgcggtggctcacgtctgtaatctcagcactttgggaggccgaagcgggcggatcacgaagtcaggagatggatcccggctaacacggtgaaaccccgtctctactaaaaatacaaaaaaataagacgggcgcagtggcgggcgcctgtagtcccagctactcgggaggctgagacaggagaatggcgtgaacccgggaggcggagcttgcagtgagccgagatcgcaccactgcactccagcctgggcgacagagcgagactccgtctcaaaaaaaaaagaaaacctaacatatcctgagcattcccatcaccgtccagccttgttccacaacaggaatttaagcgggcggtggtcccgttgcatggatgcccaggtgccgttgtccaggccggtttccagggagccgcagagggagggcaggaggtcgccgcacttggccccgcgccccagggcgtctggttttcggggacgacgcagggccggcgagggtgcggccgtttcaaaatttttttttttgagatggagtgtcactctgtcacccaggctggagtgcagtgacacaatctcggctcactgcaacctccgtctccccggatcaagcgattctcctgcctcagcctcaccaagtagctggggttaaaggcgtgcgccaccacgcccagctaatttttgtatttttagtatagacggcgtttccccatgttgcccaggttggtctcgaactcctgacctcaaatgattcgccagcctcggcctcccaaagtgctgggattacaggcgtgagccaccgcgctcggctcgtttcaaactttacattgcttcttgggacaggaacctcctgagtttgggactaagtttggacagacgcgggcggcgacttctcccaccacttcccggcccccgcccggcacagagtctggctcagagcccggatgtccccgaggggcggggaggggcgggcgggcggggcgctcccgccaaattccggacagcaacagggcgggccggagttctcgcgagaactggcaggcggcgcgcagctgcgggcagctgcccttcccgggccggcatcggcggcacagtgcgcaggcgcagccggcgcgtttctccgggctacagccggcgccgccgcccgctagtccgccgcccggcgccatggcgggctgcgcggcgcgggctccgccgggctctgaggcgcgtctcagcctcgccaccttcctgctgggcgcctcggtgctcgcgctgccgctgctcacgcgcgccggcctgcagggccgcaccgggctggcgctctacgtggccgggctcaacgcgctgctgctgctgctctatcggccgcctcgctaccaggtgcaggccggcgggggccggcgggggccggcggggcgggcggcggtccgcttggcgcggcgcgtgggcacctttctccccgggcccgcagtggcctcccacgcgcgcgctcttcatccgcgagttcaggtcgcaggaggggaccctctctctccgggctcgggcgccctgcacccgaggagtgggttgttaaattgcagcttgtgcagctcagcaggtgcgcgtggggtggagtgagcgagcccgcgagtgcttttatgtaacttaaggtgcagagacctacctgctgccctgtctcaggtcaaaggccccgcagtgacgtgggtggggctgggcgcacaggcccgggtgccctgacctcataaactaggcttaagcagttttcctacagccctgaatagtaatcacgaataataataataatgacagctaaaatgtaggtagcagttagtcttaagtgttttacgtgggtaatccttactgcagtcctaaaaggtaggtactgttatcccctggctgtagatggggaagcaagctcagagaggttaaataatttgggaggccacacagccagagagcggtgggtgcagaatttgaacccaggtcgcccacttctccctttcaacctcagcaaatcggctctatctgcttgcctgtgggttgcctattccgggaaggtcagcagcccagatctgtactctgaggactgtgaatgactgagcttctcttgggttcctttcagatagccatccgagcttgtttcctggggtttgtgttcggctgcggcacgctgctaagttttagccagtcttcttggagtcactttggctggtaagaattccttcggaaatactggttttcaggcgagggtggacagatcagagggtctgtagcggcatttcctcatccctgtctcatctgtgaccggcagaaggctgttcagggttctctggaaacgaagtctcctggcttccccctagttgctcacatttcagcccttgtgatttcgtgcctgtgggttgattgtgaatcaggcagaaacagatctccctggcacccccaaaggtgctgtcatccgcagctgtggtgacagcattccgtaacttsagcagcccttcccggaaggggtgcaggtcctcggtggcgggcaggggcagggctctggcttgtcttcatgggcctttttcatctctaatttctattaggtcacatctagtgcatccccacagccactgtaggatttttccctacactatgatttcagtcccttgagccttctagtctgacctggatatgaaccagtggcttcaaggtaaaaagttttatctcctcttatcaatattttgagccatctaatccttctttgccggaattatttcagttttgttaaattttgtatccgacatacatcactcctttatgttgttatctccctctttcatgttttattgtgtgtagtgtcatttttaacggacagaagggcccataatgcctctgtgacctatgggtttgttttgcctgtgacattcaaaaacagtcccttgccgggcgcggtggctcacgcctgtaatcccagcactttaggaggccgaggtgggcagatcacgaggtcaggagttcaagaccagcctggccaagccaggagttcgagaccagccttgccaacatagcgaaaccctgtctctactaaaaatacaaaaatgarctgggcgtggtggtgggcacctgtagtctgagctacttgagaggctgaggcaggagaatcgcttgaacctgggaggyggaggttgcagtgagctgagatcacgcagttgcattccagcctgggcgacacagcgagactctgtctcaaacaaaacaaaacaaaacaccagaaacaaaaacagccccttaaaaactccactttttgcaaacctgaggtagtagatgctgcagatgggtacctgtgtccactctcagacaggtgagaacagggcctcatagacttagggacagctcaggagacccagatgtgcacttatggttaacttggttctcttgtcccaacttaactctctttttgtctttaaataggtacatgtgctccctgtcattgttccactattctgaatacttggtgacagcagtcaataatcccaaaagtctgtccttggattcctttctcctgaatcacagcctggagtatacagtagctgctctttcttcttggttagagttcacacttgaaaatatcttttggccaggttcgtgtgccttatgtccccctctrgaggggaaaagggtggctcccattcaggctgaggacagtgacattgattcacctttcaggtctaatctcccccaagygattttccgcagacctctatcctcactaagctatttatraaggatgagctccgctcatgaattctgcctctggatattgactcgaggacgtgctgaccttttgctttaaagtttgcatcacatagtgcaccatctaatttgaagccccaaccttgagtagttgtgattctaattttataatcagatgatatttagacgtttcatgtaagagtttactggccgggcacggtggcgaacgcctgtaatcccagcactttgggaggtcgaggcgggtggatcacaaggtcaggagttcgagaccagcctggccaatatggtgaaaccccgtctctactaaaaatacaaaaaagccaggcgtagtggcacatgcctgtaatcccagctactcgggaggctgaggcaggagaactgcttgaatccgggaggcggaggttgcagtgagccgtgatcgcgccactgcactccagcctgggtgacagagcgagactcccatctcaaaaaaaaaaaaagagtttactaacaaggtcgggtgcagtggctcacgcctttaatcccagcactttgggaggccgaggtgggtggatcacatgaggtcaggagtttgaaaccagcctgaccagcatggtaaaaccccgtctctacgaaaaatacaaaattagccgggcctggtagtgcatgcctgtaattctagctacttgggaggctgaggcaggagaattgcttgaacccaggagatggaggttgcagtgagctgagattgtgccattgcactccagcctgggcaatgagagtgaaactccgtctcaaaaaataaaagcctccgtatgtggaatgcactctgaaattgaatgtctcacagccaatgaaatgaaatacatgtggctcctgggattcagggtggaaaccttggacccttttttgcttctcttagctatacttgtccccagatgaaggactgagcatgtggccgggggtcgtgaaccagagagcccatcagctgtagcaggagagcatctctttaccatgatgctttcattgtgcttattggtgttttaaagtaaattgatgaacagcataacttaggggaatgtgttttcttatgaaattttaatgtgatgacaaatgctgattgcccagcagcacattttctgtttctgtcttcgggaaaataggttaattttaagcagtgcgaaggggagctcaggccagtgttttcactccccgtgtgtcgttgatgtctctctcccacagaactgaagcagattacctggctcagtgtcacagggctgctgatggtggtcttcggagaatgtctgaggaaggcggccatgtttacagctggctccaatttcaaccacgtrgtacagaatgaaaaatcagatacacatactctggtgaccagtggagtgtacgcttggtttcggcatccttcttacgtcgggtggttttactggagtattggaactcaggtataatattaaatatgacactgcttttcttttttttttttttaagtaacattttaaacgtgatattcacgtagcataaaagtcaccatttcaaaatatacaattagtggttttcagtgtattcatgaggttgttggtctcctttaaataataggtacatgttcttcttggcgcgtttcaagtgataatttaataaaagtcaagagaactaatgwagtccttaatgcttttcactatgtgcccagaacctgggtgcgtaagtccttggtgattcttggtgctgttagctacctgctgtatcccttcatcctgtttctgcctctgtttgtttgttttcttttttctttttttttttttggtagagacagggtcttactgtgttgcctgggcaggtctcaaactcttggccttaagtgatcctcccacctcagcctcgcaaagtgctagcattataggcatgagccattgtgcctctccctttctctgccccttcaacctattaatagatctgaagcaccccagagggggtgaggacagagatggggcttagggaagggagtgccctctgtcactcatgtggcagcttggctagttttcatcagaaataggtattaatggggccgaggccatgtgttagtgagctgtgtgagccatggaggtttgttctgtctcaggctgaagaaaaggccttgtttcgtttcttttcttttctttctttcttttttttttttgagacctagtcttgctctgttgaccaggccagagtgcagtggtgcgatcttggttcactgcaacctcwgcctcccaagtagctggaactgtaggcacgaaccaccatgcctgactacttttcgtattttttttgtagagacagggtttctcgagttgcccagagccatcttgaactactgagctcaagcagtctgccttcctgggcctctcaaagtgctgggattacaggcttgagctacagtgcctggccttttttttttttttttcctttttgagatggagtctcactctgttgccctgttgcccaggctggagtgcagtggcatgatctcaggtcactgcaacctctgcctcccaggttcaagcgattctcttgcttcagcctcctgagtagctgggactacaggcgcccgccaccacacccggctaattgtttgtatttttagtagagatgaggtttgactgtgttagccaggatggtcttgatctcctgacctcatgatctgcccgcctcggcctcccaaagtgctgggattataggcatgagccaccgtgcccagctttttttttttttttttttttttaaagacaggatcttgctgtgttgcccagcctggagtgcagtgttctgatcatggctcactgcagccttgacctcctgagctcaagtgatcctcctacctcagcctcccaagtagctggaatacattacaggtgttgccaccacgtccggctaatttttaaattttttgtagaggtggttctcctggacggttgcctgtaatcccagcactttgagaggctgaagtgggtgggtcacttgacatcaggagtttgagacaagcctagccaacatggcaaaaccccatctctattaaaaatacaaaaattagttgggcctggtggcacatgcctatagtctcagctactcgggaggctgagacctgagaaccgcttgaacctgggaggtggaggttgcagtgagctgagattgtgccactgcactccagcctgggtgatggagtgagactctgtctcaaaaaaaaaagagatggttcctcctttgttgcccatgctggtcttgaactcctgggctcaagccatcctcctaccttggccttctaaagtgctgggattaggccaggcatggtggttcttacttataattccagctagtcgagagactgaggcacaatatttgcttgaacctgggaggcagaggttgcagtgagctgagatcacgccactgcactccagccagggtgacacagcaagaatctgtctcaaaaagaaaaaaagaaaaagaagtgtaaggattataggtgtgagccactgcacctgctctatgtgtgtgtgtgtgtgtgtgtgtgtgtgtgtatttttttwatttatgtatggttttttgttttgttttgaggcagggtctctcacccaggctatagtgcattggcatgatcatggtttactgcagcctctacctcttgggctcaagtgatcctcccaccttagtctcctaagtatctgcccaggctggagtgcggtgtcacaatctcggctcattgcaacctccgcctcccgggtttgagtgattctcctgcctcagccttctaagtagctgaaactacagatgtgtgtcatcacacctggctaatttttgtattttttaattaatttatttttttgagatggagtttcactcttgttgcccaggctggagtgcaatcatgtgatctcagctcactgcaacctctgcctcccgggttcaagcgattctcctgcctcagcctcctgagtagctgggattacaggcatgcgccaccatacccggctaattttgtatttttagtagagacggggtttctccatgttggtcaggctgttctcgaactcccaacctcaggtgatctgcctgccttggcctcccaaagcgttgggattacagacatgagccaccatgcccagcccctggctaatttttgtatttttgtagagacggggtttttccatgttgcctaggctggcctcgaactcctgcggttgagtgatctacccgcctcggcctctcaaagtgctgggattacaggcgtgagccaccacatgtatttctttttctttcttttttttttttgagacagagtctcactttgtcgcccaggctggagtgcagtggtgcgatcttggctcactgcaacctccacctcccgggttcaagtgagtctcctgcctcagcccccgcgagtagctgggattacagttgtgcactacctcgcccagctaattttttgtatttttagtaggtttagtaggggtttcactgtgttggccaggcggttctcaaactcctgacctcagatgatccacccgcttcagcctcccaaagtgctgggattacaggcgtgagccactgcatccaacccgcatatttcttttttaaaattactatttggctaggcacagtggctttgggagaccagagcaggaggattgcttgaggccaggaattagaaaccagcttggctggccgggcatggtggctcatgcctgtaatcccagcactttgggaggctgaggcaggcagatcatgaggtcaggagatcaagaccatcctggctaacacagtgaagcctcatctctactaaaaatacaaacaattagcctggtgtggtggcacgcatctgtagtcccagctacttgggaggctgaggcaggagaatggcgtgaacccgggaggcggagcttgcagtgagccgagatcgcgccaccgtactccagcctgggcgacagagcgagactccatctcaaaaaaaaaaaagaaaaagaaaccagcttggccaacatagtgagaacccttctctccagaggaaaaaactaaaaatatatctggaagttgtagtgtgcacctgtagtcccagctactcaggaggctgaggcaggaggatcgctttgattgctgctgtactccagtctgggcaacagagtgagaccctgtcttaaaaacagaaaacaaaattatttatttgtgtattaaagatgagatctcgctgtgttgcccaagctagtctcaaactcctgggttccagcagaccttctgcttttgtctcctgagtagctgggactataagtgtgcaccaccatgcccagctaactttttgttttttgtagagatggggtcttagtgttgcccaggcagattttgaactcctgggctcaagcagtcctctcactgcagcctctcaaaatgctgggattacaggcatgatccaccatgcccaacccaaagccttatttcttttttttttctttttgagacagagtctcgctctgtcgcccaggctggagtgcagtggcgcaatctcggctcactgcaagctccgcctcctgggttcacgccattctcctgcctcagcctcctgagtagctgggactacaggcgcccgccaccatgcctggctaaattttttgtatttttagtagagacggggtttcactgtgttagccaggatgatctcaatctcctgacctcatgatccacttgcctcagtctcccaaagtgctgggattacaggcgtgagccatcgcgcctggccgccttatttcttgaaactgtttcttgattctttactcttggtcctagaaaaacttggccaaagaatgtgaatagatcttggaaaattcacsaagtgtttgggaaaagtctccaagtctttgggcaaatccagagatctctcaggcatcccatcagcaatgcatggtccttggtgactctggtgacccctaacggtataggtggggcaaatgatcacatagcatttacaatttttgtttctgaaacatgtaaaaccgccacattaacaatcaccttccctgggaacaaattagttatgactgaataatgtaatttgccataaatgcttgcttcctgtatatgtgtgtgcactagaaccaaagggttttccatacctttttgcccatagattttttttacattgtgctccagcacttgtgtgtgtatgaaaggaacatgtctttcctgatataatacttacacttactgtttacaaaatcctgttttctatcttattatttcaatactgttcataatgtactaaatgatttcatggcttagtaacaggctgcagcctgctatagagaactcccactgtagggtatccccagcaagctatgccagatgtgagggtacaggccccggagtcactgactgggccagtcctgattctgacattcactgcttggcctccttctcctctcatgttaaagtgggggcagctagacatagtggcacatgcctgtagttccccctactctggaagctgaggcaggaggatggcttgaggccaagagttcaagtccagcctgggcaatatagtgagaccctgtctttaaaaaataataaaattttaaaaaaaacaaagtggggatagtagcgtgccctcaaaggtttgccatgagagttgaacagggtaatgattgtaaagggcttagcatggcgctgggaacatagtaagtgctcaataagagaaggtgtgagaggtcaggacatgagcctggctctccgggtggctgtattggagcctaaaatatatattcagaaaacatacagaaaatgtatgttggggaagatgcacatccacaggggaccagtgggcaggtgtaggtgagtggttccctgaggagctggggaatgcttttggccttgaaggactgtttggctggagatcagtgggaaggatgttctttgttttttttgagagggagtttcgctctgtcgcccaggctggwatgcagtggcgatctcagctcactgcaacctctgcctcctgggttcaagcaattctcctgcctcagcctcccaagtagctgggattacaggctcccaccactacgcccagctaatttttctatttttggtagagacggggattcgccatgttggccaagcttgtctcaagctcctgacctcaggtgatctgccctccttggcctcccaaagtactgcaattaacagacatgagccaccgtacctggccaggatgttcttaaaggtggaagaaagggccaggagttcgagaccagcttgggcaacattgtgaaaccccatctctacaaaaaatacaaaaattagctgggtgtggtggcatgtgcccttagtcccagctacttgggaggctgaggtgggagaatcacttgagcccaagcagttaaggctgcagtgagccatgatcacgccactgcactccacgtgacagagtgacaatctgtctcgggggaaaaaaaagaggcaaagtgggcacagcgtggggagggcaggagactggggaagtgggcgaagtgctgctcttctggggttggaaacccagactcagggggtggggttcagtctctggagctctctgagcgtggaggtaatctgctggaaggggcatttcggaagctgagttttgtggcactgtatctcgtgctgaagcagaggctgtgggtttaggaggcagaggcccaggcagctgtggtgtaagcgaatgcatttgtggtgggagggtcctgggcaggaaggcagcgtgcatgggacctcatgttggggagctcacacctggaggtggggggcattgctgtcaccccaagctgagggttgaaatccaagaggttgatcttgtgatttacagatctctctcatgtaagaggagcaacaggaaagcacgtgagaaaggcctgcagcactgagtgctcagggctaaggtgacagtrctgctcccagagaccctgacggtctcagcagggcatgggcacagaaatcctctgggtattagagacagacgcctaccaaagcacagggcgtcatcccacggtcaccctgatgagcctggtgtctccctctgttaggtgatgctgtgtaaccccatctgcggcgtcagctatgccctgacagtgtggcgattcttccgcgatcgaacagaagaagaagaaatctcactaattcacttttttggagaggagtacctggagtataagaagagggtgcccacgggcctgcctttcataaagggggtcaaggtggacctgtgacgggcagtggccccggtgaccttggggcctccgaccctgtgcagcctgggacaaaactgtttccggttggccgctgccacatggattttcttaatcgttttatgtcattagtcactcttctggaatgtcactcaagaccaagcggtcagaaggcctgaggacccaaggccccactggagcagtctgtccttatgccgaatcaaggcggaacatgggtgaaagacgagtaaggggcaaatcacagcaatattccacagcgccctccagagttacctggggaggaccgaggccacacgccactgcccccgaggccagagtgtaagtaaaggataaccaggactcgctgggagagatggactctktcctcagcaacactccacagcagaaaggggtagcaggtaccccttcttatcagcggtaaaaatgcatttacaacctttcatttaaccgaaaaacacaraccgctttaacctctttatttctgtcccccactgcatgaacatctatacaattttaaaaatacttcctcataggatgctttggcccttcatctatttaatcatagctacatacctattttttataagtagcagtacacattcaaaggggtattcctagctcaatgcttggtgttctagttcaacttttatcctgcagcaagtaagcctagataactctacacratttggctgagtggctttgtgtgaccgtggccccaggccaaggggatcatggccctggctggctttcccgggggtctcagctcctgttgtcagtgataggcggctcaaaggagcatcagtttcttttgatccaagaagtgcttactgaatgcctgccctgtgcgtggccttaaacattgagaagtgctgctctccgtttatttgggatttgattctcattttaccatagcttatattctcaatttcaatgccagtctcagaactcttgttttctgtgttctgttctcaaaattacattgtccctcatgtcatttcaaactgttttccaaagggatttgagcatatacaactacaaatccaagcagattgactctcaaaaataatcttaaatactgcaaatagtcccaactaagattcagtcagtatgtttgttttgcaagtttgggagagtaagttggctttgagtcacacatcgaagctttaagaggtgagacgctggcttcattctggactagacaggaacttggcctcagcgtgagatcctgccatgcagtgttgcggtggcactgaagaagtgtgaatgtgaaggcggcgtcggcgcggggccagagcaccactctgctgccccaccacgcggcctgtgaggagccactaaacctttccgtgcctagacctccccatctgtggaatggggtcaataccacctacctcacaggggtgttgtgaggactgagaagaacaatgtcaaatgtttttaatactcagatgtgggagcgacatcaatgaaatctgtactgtatgaaagctacacaaaaatgggcagacatttggttaattgtgccagatacctaaaatgtaygttcagaaaagcattttatcaactcagaaatatgacttatttctagatttcatggcttaatgaattttttcattgttatatataccaaagaggcttacgggttcattgattggtttgaaaaccagacagacggccgggcgcggtggctcacgcctgtaatcccagcaatttgggaggccaaggcgggtggatcatgaggtcaggcgttcgagaccagcctggccaacatgataaaaccccgtctctactaaaaatacaaaaaaatagctgggcgtgctggcgggtgcctgtaatcccagctactcaggaggctgagacaggagaatcctttgaacccaggaggcggaggttgcagtgagttgagatcgggcctttgcacttcagtctgggcaacagggcgagactccatctcaaaaaacaacaacaacaacaaaaaaaaccggacggacttgcccatcggccctcacgacacgcgtgcagtgggactctagccaaggcggtggccgagccatcattacaatttttctggagtaaaggatccacggtgggacatcaactggcacttactctgtttaggaacttgagttgaatcatttctaaacttgtcctttagaccacgcctagggcagcaaattccacttcctagamctgcaaaccgggagaggatgtagttagattctggcatcctgccccggctctttgagggaaaagttctttcccctgctctaagtagggcgggcccagcctccattcccattgggagccatgaagttgtcttgttgataggtctagggcagctgttggcagctgctggccttgtggatggtaagctgactgtgttggcatttaatgccatcctccatctgccagaggcccaggaagcccaccttcacaccaggcccaccagctggaaggagcccaggaggcaggtcttagggtttcatggtgaaatgctgtctgacaccagggaaaacttgacgtactctgctttggagaggaattccaggggtagggatggtgggagaacattcccaccctgtttataatcccagagcagaagtcagcaattacttagggataaaagatgaactccattttttttattttcttaagacagtcttgctctgtggcccaggctggaggctggagtgcagtggcaccatttcggctcaccgcaacctctgcctcccgggttcaagcgattctcctgcctcagcctcctgagtagctgggattacaggcttgggccaccatgcccagctaatttttttgtatttttagtagagacggggtttcaccatgatggccaggctggtctcgaactcctgacctcaagtgatccacgcgcctcggcctcccaaagtgctgggattacaggcgtgagccaccacgcccagccaagatgaactccttaaggacaggatttggtaagtgattgacttctttttagttccatgatcttgagattatttttagctttataaatttagcagtggcagggcccgtggagaatcaggttaatgaggtaaaggctttctgggtatttgctgccaaggccacatcaccaattttctcgatttaaaaaactgtcaagagatttatttttccattgcaggttttaaagtggagattctgaagtggaaaataggtactgtcagaacaaagctacctggaaacagcatagagtgaagcctttcgtgagggcttgcaggccgctgctgagtggcagtttacagaagaggtygcggggtgagcctcttagcaggacagaaaacaaggcagcagcgcacctgccaccccttcacgagctgctccttgagcctaaaaagtaggctttattcatcccttctgttcatttaccaacctgggggattgatacgaccggggaaaatgttcctaaaccaggaagctgcrttagccgatcaggcttkgtaagatctcgccaacagctagctgcttaggagtacccccacgatacgcacagcacaccactgtcccttcactgcactttcttcctgccttaggtagttgggcttgcccaccctagtttgcttttgtagtggtttggcaaggttagaaggcctcggcctctctgtcatgctgggaagtgcctactctctgggccactgctgcagaggcygtggcacttgtcatgggtttggaagacccagccatctgcagcagaggcagcctatcccattgcaaggagaggaactgaacrgagtaattattctactcttctttttacataaatgtttatttaaatattctaaattggattttcwttcacagatactgattattctttccagttcttaaataaaactgcacttgatttcactcaaccacagtgtgattgtctgggatgtgaaactctgaggtcactcttgggtaagaagcgtcttaagcctttagcctcaaacgacgtgtgtttggcctcctcaatttctttctgaattcctacctctaaccagttgtaatgataattccttttgccctgcaggccaccacataggtttgtaaggccttggaacaggagcctcagtgcccctgaagtagcaggtgcagggacagtggacgtcaatgtgagtgatgtgttatgtgttgaatgtgctgccatgttagcacgtagacccatttgctgttaatcactgaatcaagctgaatatttgcttaaatgtgactatctgggcatcattttgccacaaaaacttgtaaaattttacgtcacgtgggttactttttaaaaagcatttattaagctcctctaaatgaaaaggatactgtggagaaatggaaaactgctgggaaaaaactactagaaaaaaggttgctgccacccagtgccttgctatcaacggaagtcggactcaggagggctgcaggagtttgggaaagcagcgaagttgtaactgagaccatctgccacataagctggccaggtgctaacccctggctttaggagctctgcccttgctggaaagggagagaagctggagcaaacgttcctcatccttccatgagtcactgctcagattactgtgtggaacttcccagtagcaccaggttaacagtgggactgttattccggaggaactggattcctttgcaatagggcaggtgccactcagtggtggagtcttgttacctaaaaccggcacaccctgacataccacactctgcccagcacagggcctggcacaccgacgctcggtgcgtaggtgtggaactagcgagggatttcttgctggattgtcactccctgatgttttccatgtggactgggagtcatcccaagctactgtgacaaggacgaagacttcatgccatgcaaacacggggaaaatcaaaactgcccaagccaaaggatctgaaattatggcctgtcagagcttctgggttttactcttgacaaatgattaccttttaaagaaataaccggccgggcacagtggcttacccctgtaatcccagcattttgggaggccgaggtgggcggatcacctgaggttgggagttcgaggccagcctgaccaacatggagaaaccccctctctacttaaaatacaaaaaattagccgggtgtgatggtacatgcctgtaatcccagctactctgggggctgaggtaggagaatcgcttgaacctgggaggcggaggttgcggtgagccagagattgcgccattgcactccagcctgggcaacaaagagtgaaattctgtcttaaaaacaacaacaacattggccaggcgcggtgactcacccctgtaatctcagcactttgggaggctgaggcaggtggatcacctgaggtctggcgtttgagaccagcctggccaacatggtgaaaccccatctctactaaaaatacaaaaaattagcggggcgtggtgtcaggcgcctgtaatcccagctactcgggaggctgaggcaggagaatcgcttgaacccaggaggcagaggttgcagtgagccgagattgcaccattacactccagcctgggcaacagagcgaaactccatctcaaaaataaaaaataaaaaaaaccatcatgggaacaaccttctgtccagtgtcccagtcttgtgcctgctctaagagcctgaccctggggaccggtcccatttgctaagtcgggtgttccctccatgtggggacatcgcccccatttttctgtttggatctgtgatgatccatatttttcagtagaggctcttctgagaggscgttcggagcccagctgtttcctttaggctctgatgtcttctctctcttttccgggacacttcctggattattcctaaagggacagcctcatgtaagcccagcccgctcccccatttcaccatatccctgcactaaaatccacttgggccaaagcactcagaatggaacgtcttcctggaaggcctcagtgagtgagaaccaggaaggctctgtctccaaaaggaccttgtctacttctgagtaggagcccatccccaggggatggctgtgagttgctgaaccatcagcctgtgtcagcggtttctggtgacactgcattttgaatttggaagcatctgagctaataaatggcggctgtgcaggggaggctggggccagactctgctctgtcaccagccgcgctgtgactctggccacttcagcaaccctctgcacacccctaggctcttctggttctcattctacagtgctgtcctctgccctgtgactatgttttcctgaaagcaaaatacacaaagatcagcctgtgactgtgtcgtaggtgttaatgcacagccgtcttcctctggcaggtactggggcgcatgcgctggctctggggaacagtcctcggtcactttctcatttcagtgacccgagtcccctagcataagcacgtgcagctcccagtggtgaaagtggatgcaggcagcagccatggctgtttataatggtaaaatggggttctgtctatcaaaggaacacckgttttatctatgaggtcacttataagttactcatctgggctgagagcctctctgaccccttgttttacaaagaggcccagccagggccccagagctggcgccaaaggggaaaagcctggagtttcctttgtcgtcctgttggcctcagaagccacatcgcgtgcacactctccagtggagagacttgctttacctggctgaggccgcgttgttcctgctgtcgtcgtgcgtgttctgtagactctctgactgctcatccacgggtgcctgaaacctggcaagggagtgggcaccagaatctcaagggagcagagccagctgctgcacggccttaagctcagaaacctcagaaccagactctgccaccactcatgcacccacctagcgtttcattcttttgctcctcaaatatttactaaggtccagtggttggcaagggccaggcctgcatggcgtgcaggagaggccaggccctgccatcatggaagctgcgtgctggtcgggccagacacgctgagggagggaagggtgtgtggtgcagggcgccaggcagacctgctttaatccaggtggagtggggagggcctctgctgacactcatccaagctggggcccgactgagggtctgtgaatactccaggcagaggcccagaagtgggaccagtctagcttttttggggaactgaaagggcattgtgactagggtgttatgaggggcagacacggtcacaggtgcacagggaaggtccccaagagagctgtccagccccgcggtgatgggaatcatagacttctaaaggactcctggcttcatggcggctggaggggtaggagggttggccatgatgatctggattcaggggagcaatagagaccaaagcgggtggattgaggcaggaacagtagagccagcaggacttgggggtgggttggaaatgaagtgggtgaaaggaatccaggctttctcccaggcttttcacctgagtgaatgtggtgctattcactgagatggggagatgggaatagcatgtctgcgggaggacgtcaagcattctggccactgctgaactcgcggtgcctgtagacatccaggtagggctgcccaggaagggggcagtgggagatgagtctggagctctggtaagcactgtgctggagcgggagctgggggtctgcgtcatgatggggtcttaaagccagggactgaatgaggtcgcccaaggagtgagcgtaggctgtggagaatgcctaaggctgagccctggggaaaaacatatctgggcactgagctgaggaggcagagccagccagagaccaggaaggaacggctggagaggctggcaggagcatgggagcgcggggctgtcagcaaagagaaggtgtactgaagactaacatggctaggcacggtcacgtctataatcccagcattttggaaggctgaggtgggaggatcacttagcccaggagttggagaccatctttggcaacatagcacaaccccatctctaccaaaactataaaaattagccgggcatggtggcacatgcctgtagtcacagctacccaggaggctgaggtgggaggattgattgagcctgggagatcgcggctgcagtgagctgtgattgagccactgcactccagcctggacaacagggaaagaccctgtctttaaaacaaacgaacaaaaaaagcccggcgcagtggctcacgcctgtaatcccagcactttgggaggccgaggctggcggatcacgaggtcaggagatcgagaccatcctggctaacatggtgaaaccccgtctctactaaaaattaaaaaaaaaaaaaaatcagccgggtgtggtggcacacgcctgtagtcccagctactcgtgagggcgagacaggagaatcgcttgaacccgggaggcggaggttgcagtgagccgagatcacgccactgcactccagtttgggcgacagagcgagactcggtctcaaaaaaaaaaaaaaaagatgaatatggcgatgctcacgagtgctgctgagaggccaagggaggaggcctggacctacgggagggctcgctgcgactggagcaagagcagactcagtggatgagtggactcgcagacctggagtgaagtgggttgagggagcaactgcagacatccacaaagtggctgctctgaagaggagcagagccggccccaccttgcccgaaacctccaggagctaggctccagcctcaatttatttctgcagaggtagagtatggcttgatacattcatggtgtgaacaagtctgtgtgggtagcacccaggacgttgtccccacccagaagcccccttcatgtccccttccagtcttccaggtgactgccaagatccctgccactcagcaactggtcctctcccactgcagccgaagtctgaggggttctgagaggtcaccacacacagacaagaaatgtactgaaaccagaaaacccagtgtgcatacagatgctccacagacaggcttcccaggaaggactggaaagggatctaaaactgacctcggggcattccataaaagcaagagcccacccaccctgatctcctccaaggaagtaccacccttgtgctcagagcttccgatctgcctcatggctccagccctgccccactcctaatatgagcagatactcaagggtgacctgacatctgagaaaaaccttcagcctggaagatagaaacctacacaagcttagagggcgtggtggcacacacctgtaatcccagctactctggaggctgaggcaggagaatcgattgaacctgggaggtggaggctgcagtgagagctgagatggcgccattgcactccagcctgggcggcagagcgagactgtctcaaacaaacaaagaccttcacaagcaaaaagcaattgggaggaaacacttcagggagaaaattccaaaaggaaaaaataaactattagcctcagaggtgtaagatattgtgtccctgaaacaacaggatgccatcaaaagaaacggggtacagaaagagctgttggacatgcaaaacaagatagcagaaatgaactacttaatggaagataaagaggcttggcacggtggctaacacctgtaatcccagcattttgggaggatgaggcgggaggatcacttgagcccgggaatttcaaaaccagcttgggcaacatggcaagaccccatctcaaaaaaaaaaaaaaaaaaggggggccgggtgcagtggctcacgcctgtaatcccagcactttgggaagctgaggcaggcagatcacctgaggtcgggagttcaagaccaacctgaccaacatggagaaaccctgtctctactaaaaatacaaaattagccgggcgtggtggcgcatgcctgtaatcccagctactcgggaggctgaggctggagaatggcttgaaccaagtaggcggaggttgtggttagccaagatcacatcattgcactccagcctgggcaacaagagtgaaactccatccaaaaaaaaaaaagggaaataggacagaaaaggtacattagagggccagcccaggggagccaatatccaacaataggaattccaaaaagaaaaagtgaagaaatcaacaaattgaaaaagaggctgggcgtggtggctcatgcccagcactttgggagggcgaggcgggtagatgacgaggtcaggtgatcaagacgatcctggccaacatggtgaaacccccgtctctactaaaaatacaaaaaattagccaggcgtggtggtgcacatctgtagtcccagctacttgggaggctgaggcaggagaatggcttgaacccagggggcggaagttgcagtgagctgagatcatgccactgcactccagcctggtaacagagtgagactctgtctcaaaaaaaaaaaaaaaaaaaaaagaaagaaatattccagcctggccaacttggcaaaactccatctctactaaaaatacaaaaattagccaggcgtgttggcacgcacctgtaatcccagctacttgggaggctgaggcaggagaatcagttgaacccaggaggcggaggctgcagtgagccaagatcgcgccactgcactccagcctcggcaacagagcaagactccatctcaaaaagaaaaaaaaaaaagaaatatgccaaaactgaagaccatgaattttcagattgaaagagcctgccagtatccaacctaatggatggaaatagactctcaccaaagtgaa

SEQ ID NO: 95078 - DNA, 142240 bp, Homo sapiens
  misc_feature (1)...(142240): n = A,T,C or G
gcctccgccctctgggttcaagtgattctcctgcctcagcctcccgagtagctgggactacaggtgcgcgctgccgtgcccagctaatttttgtatttttagtagagatggggtttcaccatcttggccaggatgatcttgaactcctgacctcgtgatctgcctgcctcggcctcttaaagtactgggattacaggcgtgagccaccacgcccagccctatttaaaccatatatagatatatacatattttttctttttttttttttgagacaaagtcttgctctgcggcccaggctggagtgcagtggtgggatctcggcttaccgtaagctccgcctcccaggttcaagccattctcctgcctcagcctcctgagtagctgggactacaggcgcccgccatcacgcccggctaattttttgtatttttagtagagatggggtttcaccgtgttagccagtatggtcttgatctcctgaccttgtgatctgcccacctcggcctcccaaagtgctgggattacaggcatgagccactgcgcccggcctaaaccatatatttaaagatagtttaaaatatttaaagattgtttaaagtgacagtttgtcaatatttttaaagagtataagctaaatataatgaattaatatctgctgttgatataataattatctctatgaagtcattcataaaatatttattgagtacctactatgtgctaggcactcttcttggagcttgggatacagcagtgaataaaacagtaaaaaattcctgctctataccttctagttgggggagaggcaataaacatatgggtgcaatacgtattaaatggtgttaggtgctaacgagaaaaataaaccagggaggaaaactgggagtactggagaagagtggggggactgcaatgggcctaatagagaatggctggggaaggccttatttagaaggtgatgtttgcctgagtaaagggtggcccaggcagaggaaggagcaagcgtgaagcctctgagatatgtccggcacattcgaagactgtccgggagctcagggtggctggagctaagtgagccaggggagagagctcatgaggtcagaagcgtggatgtggctgtggggcagaaccctgaatgccacagtgaggactgttcagatcccagattcattgtgaaggcagagcttgcaggatgtgctgatggtttggatgaggggtgtgagggagagagagagtcacgggtgactccttgggtcttggcttgaccaactggagggacgggactgcaatttcctgggatggccatttctgaggggcatcaggacaaggtgagtgtcgggtacctgccatgcaaccaaagtgagatttggtgcagacaagggatacatggatctggaatttaggggagagctctgagctggccagagatatgtattatacagatgggacttaaagtgatgagacaggctgggtgcagtggctcatgcctgtaatcccaggactttgggaggccaaggcggacagatcacctgagatcgcgagttcaagaccagcctggccaacatggtgaaaccctgtctctactaaaaataaaaaaattagctgagtgtggtggtgggggcctgtaattccagctactctggaggctggagcacgacaatctcttgaacccgggtggcagaggttgcagtgagccgagatcgcgccactgcactccagcctgggcagcagagcgagactttgtctcaaaaaaataaaaataacaataaatttagagtgatgagacagccaggcatggtggctcatgcctgtaatcccagcactttggtttgggaggccaggatgggtggatcgcttgagcccaggagttcgagaccagcctgaccagactctataaagaaatacaaaaaatagccgggcatggtggtgtgtgcctgtggtctcagctactcaggaggctgatgtgggaggatcatgtgagcccaggaggtcgaggctgcagtgagttgtgattgcaccactgtgctccagcctgggtgacagaatgaaaccctgtctgaaggaaaaaaaaaaaaaagtgatgagacagaatgagacctcaagagttcaagcactgcttggggcttgtctaaagttctgacaggaggcagggaggcagtgccagcagagcaggctgagcagtggccagcgagggaggaagacggacgtgagggaggagcgcttccaggatagggaggtcacatctgctcaatgccgttgagaggtcaaggaaaatgacttctgacaacagattatcggatttagcaacttggaaggaattagtgaccttgatagattgactggtagaatcaaaaaccaaactggaacaggttcaaaggaggatgggaggtgaggggagagggtgtgtgtgtaagcagctcttttgagatgttttgctgaaagcagggatagaaatggcccatagcttgaggagcaagtagaaaatagcctaacacgagaaggtgagactgtggaaggtgcaaaatcagtgtaaatccattagcactatggccaaaatcattcacaaggtttttgctgaggaattgggcgcccccattgccatccttaaaaacagggcaacatcataagtagtaatctggagcactattttctttctacagtgcagaatgggtacatgataatctctgggctgagctgttatcttttctgggtccctctaccaccttcggggtagtgatgtgagcaggagggacagatgctgtctcaggtggaagggtagccacaccctttcccaaaagtataggaactgttccagatcactttttggcctcactctggagggcccaggctatttcattctaaaccacttggcccatccttgtctaagattccctctggttcagtgtgtggctggaatctggctttttgtgtccctgatttgtgtcccaagcagcatttgaactttttttttttttaagagacagagtctatgttgcccaggctggagtgcagtggctgtttacaggagccatcagagggcactgcagcctcaaactcctaggttcaggggatcctcttgcctcagcctcctgggattatgggtgcaagcccccatgccaggcagatttagaagattttgaacaatgaagtgtctgtaatgctcagaggagcaagcacacctatacagggagcatggggtcttagtaaattcttgctgcactcatagctgggggaagagcagtatagagaaacagaaggtttgaggagggaagaggaagaaaggccctacctcagcctgccaagtagtcctcacaacggtcaggaaagtatttatcacccccatatcataggtaaagaaactgccaggctgggaacagtgatgcacacctgtaatcatagcactttgagaggctaaggcaggtggatcacttgagcccaggagttcaagaccagcttgggcaatgtggtgaggctccttctatacagaaaagtacaaaaattagctgagcatggtggcacatgcctgtggctccagctactcaggaggctgaggtgggagggctgcttgagctctggaggcagaagctgcagtgagcagggattgtgccactgtactccagcctgggtgacagagccaagactctgtctcaaaagatttaaaaaaaaaaaaaaaaaaaaaaaggaaactaccttgcctgaggctctaaatctagttactgcttccaaccatttcaggattcaattgggaagaggtggtgtttgaacaggcttgggggcccttgatgcttgcatcaacttaattctcactaaaaaacaaaagtctgcgtccggacgaggtggctcaggcctgtaatcccagcactttgggaggctggggtgggtggatcacctgaggtcaggagttcaagaccagcttggccaacatggtgaaaccctatctgtgagaggtgacagcatgctggcagtcctcacagctctcgctcgctctcagcgcctcctctgcctgggctcccactttggcggcacttgaggagcccttcagcctgccgctgcactgtgggagcccctttctgggctggccaaggccggacccggctccctcagcttgcggtgtggtgtggagggagagtcgtgggcggaaccggagctgcgagcggtgcttgcgggccagggcgagttccaggtgggcgtgggctcggcgggcctcgcactcggagccgcggccgtccccgccggccccgggcagtgaggggcttagcacctgggtcagcagctgctgtgctcaatttctcgcagggccttagctgccttcccccggggcagggctcgggacccgcagcccgccatgcctgagcctccccccactccatgggctcctgtgcggcccgagcctccccaatgagcaccgccccctgctccacggcacccagtgccatcgaccacccaagggctgaggagtgtgggcacacagtgcgggactagcaggcagctccacctgcagccccagtgcgggacccactgggtgaagccagctgggctcctgagtctggtggggacatggagaacctttatgtctagctaagggattgtaaatacaccaatcggcactctgtatctagctcaaggtttgtaaacacaccaatcagcaccctgtgtctagctcagggtttgtgaatgcaccaatcaacactctgtatctaactacgctggtggggacttggagaacctttgtgtcgacactctatctagctaatctggtggggacatggagaacctttgtgtctagctcagggattgtaaacacaccaatcagcaccctgtcaaaacagaccactctgctctaccaatcagcaggatgtgggtagggctagatgagagaataaaagcaggctgcccgagccagcagtggcaacccactctggtccccttccacgctgtaggagtgttgttctttcgctctttgggtccacactgcctttatgagccgttaacattcactgtgaaggtctgcagcttcactcctgagccagggagaccacgaacccaccagaaggaagaaactccagatgcgccaccttaagagctgtaacactcaccacgagggtccgcggcttcattcttgaagtcggtgagaccaagaacccaccaattctggacacatctgtactaaaaatacaaaaataagccaaacgtggtggtgcatgcctatggtcccagctactcagtgtggttgaggcaggagaattgcttgaaactggatggcagaggttacagtgagctatcacaccactgcattccagcctgggcgacagaacgagactctatatcaaaaaaagaaaacaggccaggcgtggtggctcacgcctgtaatcccaccactttgggaggcagaggcgggcagatcacaaggtcaggagatcaagaccatcctggctaacacagtgaaaccccgtctctactaaaaatacaaaaaattagccgggcgtggtggcaggcgcctgtagtcccagctacttgggaggctgaggcaggagaatggcgtgaacctgggaggcggagcttgcagtgagctgagattgcaccactgcactccagcctgggcaacagagcaagactccgtctcaaaaaaaaaaaaaaaaaaagaaaacagaaaaacaaaattcttagtataaaagtcttgaaatcacagagttctgactttgactgcccctgcttctgggagctacagatcatgctgtgggctgcctccacggtctggtaactcaagggtgaccggggtgaggcacagttccttcagagctacctagctgagtgtaaatgggttgttcaaattgcactagggagccggagttgcgtgggttttaatttaaagatgtaagtacaaatctatgtgcattgtagaaaattcggaaaaggtccaactgcctagcaagtaaaaagctgtcattccagcacgtggggggtgaccgcttctcccttcttgggtgttttttggtggattttttttggtgaccccgactggcctagactccattcaagggcacatcttgtgcagtaaaacacgcatgtttcagggctcctcactgcaacacgtgcacctccaggctggcgctcagcgctcccagwaaaagctgcaggcggcggtgtagatagtcgccggcctttcctcctccccacctcgtgacgctttgtgctgcggaagcaaaggcccgttccattccccgtgtcttcccagcagccgccaccaatgctcctttctaggaaacagccttccattctctcttagggccgatcttagcgagagccgcgatgcgggcgactggtgccggggtgggttgggggcgggggtgggaatcaggccccactgccaggagcccgggccgcgccttccgctctgacctcatccggccgcccaggcactgggcgcggcagcgaatcggcggcgcgggcggccgggaacgcccagcacaaatatttaccgccgcgcggagagtgagggcccaagtccgccctgctccgccacttaggccgccccagacgcttccctcggggctgccaccgggtcgggcgcggctgccgcggctagcgggccttccccgcaccggcgcggcccaaccgccaccgaaccttctggaagcggcggctgcctgggcccccacgccgccagaatcgtacgcccgcgcgagctctctgcagccttggcggcctgggaggcggggctcggggtggggccggcgcgggggcggggtcggcgcggggaggccgcgttcgattgcccccggcgcgcaggccccgcctcaccagccccatcgctccacctctgccctccccctttatggcgcggcccgggctcattcattccgcgccgggcctgccagacacctgcgcccttctgcagccgcccgccgcatccgccgccgcagcccccagcatgtcgggcccagacgtcgagacgccgtccgccatccagatctgccggtaagagagggcccgcgcgcagcctgcagcggccaggcgcgccggtcaccgccccaggcctgccccgcttggctctgtggtccccacccgccgaggccgcccccgcccgccgattccccgcacggccttccgcgccgccgccccggacgcccgcccggccgggatgcgactcgcgatgccgcacaagccgggcggcccccgcccgcctccagccggctcctcctggccgcatctccagggcggcggccgcgccacgggccgtttgggcgagaaagccaggcagggacggggcgggcggaggtcaatgcacagctccagagcccggcgaccggcgcccgtgggccgccccgcctcgggcctcgcccgagcatcccggagcctcagccccgtggtcctgcttagcctcctcgaggattcgggatcattacctcggcggttgtgctgcgctaaccaaagcccccagaggtggaggggaggtgcccagagccgcgcgagcccctcggtgggtgcccctgtgggaggaggttgcagagctaccgtcttcagtgcactgcttcggtttgggggagggcaggtgttgaaaggaagaacagataatactgtctacctctaacagtttactatgaagaaaagggaatcagtggtctgttgggcctgaaagcatcttacacaatagaggcaaagggttgtccttctagagcaccccctcttcttccaccaggtactgagtagatagatgcaggcccccagaggaagctggaggctggagatcatgaacaagctcatttcccataggaggtggggagggcagcctgaaggttactctgcagttctcttcggcagaatcggaagcagcaggctggcatttgtgcatgagctaagtgaggacaaggagtctaggttttcagccactgcacacaggctctgtggcctgcgaccggtcctatcctgcttgatgaactaccaggagtgagagctgctttctgttttggtagtgggttcctcacatttgggggttgggcatcacagactgaccttgggctcaagccaagtccaatagaagcaagttactttcctgtagatgttgacatctccaggaaggctgggcatatagcaagtcctgggtctatggcgattcttgactctcagtctcatcttctggcctggtcgagggcctctccttacctcaaggtcggttttgacttttccagagggggaacgtctttgggggagccctgcccctttgactttggctctgtggctgttctggtcccatcgactctggaggtggggaaagcggggcaaaaaaaaaaaaggaaataactggagacagacagcctgcatcaggttcctgaatcagctctgctgagtattggctgggaaacttgggctccatggtttgcaaagagcttatacctgtctcatcccacttggtttgcccaattccctgggaggttgatggtcggtagtgccacccttacctgtgtggaggaggaaatggcagttttgggagttgagtaactgtgtaaggtcatcctgctccaggagatccagggacagcccctgcccaagtcttctgactccagatccagtattcttcccacccctctcctgaataaaggaaaccttgatttaaatcttcccgtggaaggctggccttttatttacttcttcagggtggtgaatagccaatttatacatgttgtcttttttcacccagcttctaacagttactagattttttgttttttgagacagagtctcactctgtcacccgggctggagtgcagtggcccgatctcagctcactgcaacccctgcctcctgggctcaagtgattcttgggcctcagcctcccgagtagctgggactacaagagtgcgccaccacgcctggctaatttttgtgtttttagtagagatggggtttctccatgttggccaggctggtctcgaactcctgacctcaggtgatctgtgatctgccctcctcggcctcccaaagtgctgggattacaggtgtgaaccaccgcacccagctggaaaaagttcttgtgcctcagcctcctgagtagctgggactacaggcgtgcgccaccacgcccagctaatttttgtatttttagtagagatggggtttcatcatgttggccaggctggtcttgaactcctgacctcaggtgatcctcccgcctcagcctctcaaagtgctgggattacaggcgtgagccactgctcctagcctagttactagatttttgtatagctttagacacttccatacagtaagtgtgtgctttttgtttgtttgtttgtttgtttttgagacagtctcgctctgtcacccagactggaatgcaatggcacgatctcagctcactgcaacctctgcctcctgggttcaagcgattcttccacctcagcctcctgagttgctgggattataggtacccgccatcatgtctggctaatttttgtatttttagtagagacggggtttcaccatgttggccaggctggtcttgaactcctgacctcaggtgatctgcccgcctcggcctcccaaagtgctgggattacaggcgtgagccactgcgcctggcccgtgtgtgtgctttttcttacccactgtaaaccaagtctgctatctcagsttcacaattgcatattgtttctttattttttggagatggagtctcactctgtcacccaggctggagtgcggtgacacactctcggctaactgcaacctctgcctcctttgttcaagtgattctcctgyctcagcctcccgagtagctgggactacaggcgtgcaccaccgtgcccagctaatttttgtatttttagtagagatggggtttcaccatgttggccaggctagtctcgaactcctgaccttagatgatctgcccgcctcggcctcccaaagtgctgagaattacaggcatgagccaccgtgcctggccaattgcatattgtttctaagtggctgccttggccagacgactggtgaggaggatgcttggctgcccctgctcatgagtgagcaggtgagcctcaggtgcagagcgtgactgccaaaggagtaggcgggagtggtggtaggggtaggcctgtgaagagaaggctgtggttccatcggcttgactcagagaaaccgcaggacactggagagtgactgtactaggatggggagccctttaaggacatctgagctgacaccccaagttgaaagaggagcctcctggcctagcacagccaagcccatgaatttaacaatgctttactggacactgccaagaagcatagcaccaggagggaaacgtgtggaaaatgtggcccctgccttaaggggtcacagtctagcaggggtgagaacgtccaaattcccaccatcttagacacaatggtcacatgttctcagttcagacattgttgaagggataggggcttttttttctttcttttttttttttttttgagagggagtcttgccctgtcccccaggctagatgccatctcggctcactgcaacctctgccttcgaggttctactgattctcctgcctcagcctcctgagtagttgggattacacacgcccgccaccacgcccagctaatttttttgtatttttttagtagagatggagtttcaccatgttggtcaggctggtcacgaagggaacagaatttttaattgcatcaatttaaattcaggtgggtagccacctgtggctggtggctatcttttggggagtgcaatatgtagagaaatttaaacatcaatttactagtaggtctgtggggggcagggtgttcctaaaggaagctccaaggctttctggggactgtagccagctctggaataaccatgctgatggagggggaccttggcatggacaccacccagcaggcagataacttggcatgctttatttataggtagatgtgtgaaatctacaaggtttttttgtgttttctttgcttgccatgctcttagatgcagatctaccaggaagtttcctgagatcaggaattgtgttgtaccatgtggtaccatgaatgcctagaatagtgtctgaggtctagttgacaggtcaataaacagcagctgagtggctatgagtttcagtatgttatggggttagaattatttcccccaagggaaaagacaaagaggggctcyacctttgtcttttttttttttttttcttgagacggagtctcactctgttgcccaggctggagtgcagtggcgcgatctcggctcactgcaagctccgcctcccgggttcacgccattctcctgcctcagcctcctgagtagctgggactacaggcatccgccaccacacccggctaatttttttttgtatttttattagagatggggtttcactgtgttagccaggatggtctcgatctcctgaccctgtggtcctcccaccttggcctcccaaagtgctgggattacgggcgtgagccaccgcacccggcctttttttttttttttttttaagagagtctcactctgtcacccaggctggagtgcagtgacaggatcttggctcactgcagcctctgcctccccagttcaagcaattctcctctcctcagcttcccgagtagctgggactacaggcacccaccaccacactcggctaatttttgtatttttagtagagacggggtttcactgtgtttgccaggctggtctcgaactcctgaccttaagtgatctgcccgcctcggcctcccaaagtgctggaattacaggtgtgagccactgcaccaggccgggctctgtctttggttttataatggaattaatgaaaagaaagaacctggccaggcgctgtggctcacgcctgtaatcccagcactttgggaggcccaggtgggcggatcacgaggtcaggagatggagaccattctggctaacacagtgaaaccccatctctactaaaaatacaaaaaattaggcgggcgtggcggtgtgcgcctgtagtcccagctgctggggaggctgcaggcaggagagtggcatgaacccgggaggcggagcttgcagtgagctgagatcccgccactgcactccagcctgggcgacagagtgagacttggtctcaaaaaaaaagaaaaaaaagttagctgggcgtagtggcgggtgcctgtaatcccagttacttgggaagctgaggcaggagaatcgcttgaacctgggaggcggaggttgcagtgagccgagattgtgccattgcactccagcctgagcaacaagagcaaaactccgtctcaaaaaaaaagaaaaaaaaaaaaacaaagaacctgatttacagaagccacactcagagcttgtattctggagcattccgcaaaatgatttacagtgctggctctcttgctgctgggatgtgtggaccctgggtgaagatgcagtctttgtaacccagagagcctgtgcgtggggaggcctttgtctacccactgtccaacctcacgctgtaagtgggccacttagcctggcattgccctggaattggcacctgcagctagctggctccccagttctggtcagaccagaagtggctttctcctgtgtgacccacctggcctgtgtagcctgcaccagggggtgaccccataggctgtcttgccatcccaccccttggcctctcactctcagagccctcctggggagggggatcaaggatgtgcctccccatccttggacccctgcrtgggaataactggggaagtctgttacaaatatgggttttctgcatgtgaacagtacttcagcagagagtcaacaagatgaagattgaggagataatggggaaacttgaatagtcccttgataatgattttaaggaatcactgcttttttttttaaggtaggataattgttttgtagtttgcttttttaaaccagctttattgagatagatttagaatgcatacacaagaatatttgaaacgtacagtttgctgagttttgatgagtgtgcacactgagtagtggcgggcccagttgtgatgtcgaatatttccaaactcccaaaattcccctactgttggcccctggcaaaaagatctgctttcactcactcgctgtgcctcttctagaatttcgtgtcgatggaaccggatcgagctcagtgctgggcctcgctcctgtgtccccgtagccctgtattaccctgttccctgcacactgcagtttctcttcaccaggccacagagacttgggatcttgtgaatgaagttcacaaatgcagatttcaattcatttaggacagaaacgtgaagtcacttgctatttaatgatattaggaatttggatgatattttagatgagatctttgttttgtggtttttatttttatttgagacagggtctcgcttagttggccaggcaactaagtggtgcagtggtgcaatcatggttctctgcagccccaaccttctgggctcaagggattctcccacctcagcctctcgagtagctgggactacgagtgcacgcctctgtgcctggctaatgttaaaaagattttttgtagagacatgatctcactttgttgccgaggcaggtcttgaactcctgggctcaagtgatcttcccacctcggcctcccaaagtgctggaattgtgggcatgagtcaccatacccctcctttaggtttttcacaaggagcttttatctttgagaggaaatgcagacatatttacgatgtcgtactgggaaatccgggatttgctgcagaataacctggcatggggagcaggtgggagcagagaccagaggtgccctgagctgactgttttggggctgcttgatggggacataggggttcactccctcctccctctactcttgtaagcatttgatgtttaccacaatgaagaataaaaagaaaaccaggctcctgagcctccaccccagagctactgcctctaactccaggggcggggaaggtcagggaggggtaggcccaggaatctgcattttcctcggccctcctggagcttgagggccactgtcagaggagggccaggcacctgccgtgttgtgcggtgtgttggccttcctcggcttccccgcagccttccagctctcccggtgcctgtgagccaagacctctctgcccaggtggaactccgcccaggtggaactcattcttctacttgcctgagggccagcctgagtggtgcgaggtttaaggtcctggaggtgggaacccttatgagtgttgcttgtggccccacccagttcatcctctcccgcagaggggtggtggccctgtcctgtttccctgtctgtgagttcaggccgagtcatggattccttgcatcactggtcttttgtagagaacatcctgtgatccagttccggaagccgaggaggcggcttgccgggggctggtgggggaggggcggtcctaggaggagcaggagcctggtgctttctatcagggagggatcacaccggctcactgctgagccggccaggcagacacaggcttgggctctgctgggcatcatacttgtcactgggtaaacagtttgcccacttaccgcaggatgaagctgcttgccagggctctccggctctgtgagtttgggaggcaggcatcttccaggaggctggtggctggccagggatgtgtggggccccggcgagggtgctgcgctcccgtccaggtggttgggcccagggctgatctcccaccctgtggagcctgcattactggaaggtaggatgactgggaatattttgtgcccatggtgtctcacttgcgacgccgactgggcagccagggccttgggccgcataacttggaggagttttggggagggtagtagggtcgggtgttggatgagctgtgtgttttgctggattgaaagtgcccacttaagtggccaccctcagtggagacctggcatgttcttcccctagggacgagcggaacacccgggctttgttggaggaggtgacctggcaaccctgggctgtgggaatctgggcctctgcagatcaaggctcctgcaagccagcagctgtgctggctcacagctggcagctggcatccgtgccctgctttgtccctaggctggatgttgagctgtgattttagaccagaaggttggtgcagggccagagggagctgttcctgcacgattggctgatcctaacagtgcagtgttgagctgcttacagatggcttttgcatactttatttctcctaaactttacagaaactctgttgagtgggcatacatacctccccctttgtgccagctttattgggttatagttcacatgccatacaattcattcactaatgtgtacaagctagtagatttcagttttatgttcacagagctgtgggatcatgacctccatcaattttgaaaggggtggtaggaggattttttgttctcctgacatggagctccccaagcccttgggacctttgtagtcctaagagtgtctagtatgctaatgagagaactggtggctgggggccctagatatagcttcaggatgggagctggtctccagaaaggccaagggaggattagcgggttagcgctttcaaccttaccttcctataccgcagaaggtagtgccagactttacttgaattgtaggacacccacctagtgtcggagagttggagaagtggggttgaaagagacacccatgtttgttattaaaagcatgagtaaaaacagctcgcctaggaatataatttttgggtcatatggtaattttgtggttattctcttgaggaattaccagactgtttccaaagtggctgcaccatttcacattcccaccagcagtgtaaaaaggattcaatttccccatatccttgtcagcacttgttattatccatcttttgaattctagccatgctagtagatgtgcagtggtatctcactgtggctttgatctacatttccctaatgagagaagatgatactgagcatcttctcatgtgcttattgaccactgtgtatttttagagagctgtctagtcaggtctttcctgtattttccaattggtgtaattgtctttttgttgttgagtgatgagagctctttatatattctagatgcaagtcccttctcagataaaattttttaattaagaaaattttccaattcaaaaaagttgtcagcctgggcaacatagcaagatctgatctctattaaagattaaaaaattagccagatgttggctgggcgtggtggctcacacctgtaatcccagcactttgggaggccgaggcgggcggatcacgaggtcaggggatcgagaccattctagctaacacagggaaaccccatctttaccaaaaatacaaaaaattagccgagtgtggtggcgggcgcctgtagtcccagctacttgggatgctgaggcaggagaatggcttgaacccgggaggcggagcttacagtgagccaagatcgtgccactgcactccagcctgggccacggagcaagactccgtctcaaaagaaaaaaaaattagccagatgcagggtaggtggggtgtgcctgtagtctcaaccactcaggagattgaggcaggaagattgcttgaacccaggaagttgaggctgtagtgagcttattgcaccactgcaatccagcctggacaacagatcaagactcttgtctctcaaaaaaaaaaaaactgtgttaaaatacacataatatataatttaccgttaaaaaaatctgccatcaggccgggcgcggtgactcacgcctgtaatcccagaactttgggaggctgaggcggatggatcacgaggtcaggagatcgagaccatcctggctaacaaggtgaaaccccgtctctactaaaaatacaaaaaattagccaggcgtcatggtgggcgcctgtagtctcagctacttgggaggctgaggcaggagaatggcatgaacccgggaggcggagcttgcagtgagctgagattgcgccactacactccagcctgggcaacagagcaagactccgtctcaaaaaaaaaaaaaaaatctgccatcttagccgggcatggtggctcacacctgtattcccaccactttgggaggccaagctgggtggatcacctgaggtcaggagttggagaccagcctggccaacatggtgaaaccccgtctctactacaaatacgaaaaatagctgggcgtggtagcccacgcctgtagtcccagctacttgggaaactgaggcaggagaatcacttgaacctgggaggcggaggttgcagtgatccaagatcgtgacattgcactccaacctgggtgacaagagcgaaactctgtccaaaaacaaaaaaaaaacaaaaaaactgccatcttaatgatatgtgtatatgtatatggttaagatggcaggttttgttttgttttttaaattgagacagggtgttactctgtcttctggggcgcatgtggtggtgcagtctcggtcactgagcctctacctcaagtgatcctcctgcctcagccacccgagtagctgggacyacaggcatgtgctaccatacctgggtaatttttgtagtttttgtagagacaggatttcgccatgttggccaggctggtcccaaactcctgagctcaagggatctgcccatctccgtctgcctcctaaagtgctgggattacaggtgtgagtcacagcgcctggctaccatatacgtatttgtagccatattttcttgctctgtcacccactacgtctcactatgtttcccaggctcattttaatcatttttaaatgtccagctcagtttttttgttttgttttttgtttttgagacagagtctcgctctgtcgcccaggctggagtgcggtggcacaatctcggctcactgcaagctccgcctcccggattcaagcgattcttctgcctcagccccccgcgtagctgggactacaggtgcccgccaccacgcccagctaatttttgtatttttagtagagacggggtttccccatgttggctagaatggtcttgacctcgtgatccgcctgcctcggcctcccaaagtgttgggattacacgcgtgagccaccgcgcccggccaagtcttgcactttcgcccaggctggagtgcagtggcgcaatcttggctcactgcaagctccgcctcccgggttcatgccattctcctgcctcagcctcctgagtagctgggactacaggcgcccaccatcacgcccagctaattttttttttgtatttttagtagagatggggtttcaccgtgttagccaggatggtctcgatctcctgacctcatgatccacctgcctcggcctcccaaagtgctgggattacaggcgtgagccaccgcgcccggctcattcccttccttttaaaggctgaatcatgttccatttcatggatggaccacattttgcttattccatcatctgtggatggacacttgggttaatcccacattttagcttgtgaataatgctgctatgaacacagcagagaccccgtttttagttctttaggatatattcccagaagtggaattgctggatcatatggcaattctattttaaatctttaaagaaacgaccatactgttttccacagcggctatgccattttacatttccaccgacagtgtacatgggttctggtttctgggcatccttgtcaatacttgttattttctgtttttttttgatagttgccatcctaatgggtgtgaagtggtgtttcattgtggttttgctttgcatttccctaatgtttagtgatgttgaatgtcttttcatgtgtttatttgtcaactgtattttttctttgtagaaatgtctactcaagttgtttgctgatttttgaatcaggttttttttaaaactgaaaattaaatatattgctmaactgtttgtatatttattcatatacttgaacatagacatgtataggtgtatatattatgtgcatgttatatacatatccttgtgtatctatataagtatccatgtatatatttttcaaattttcatcagtattctgaaactgaagactatagcttttggtgtttgagaaagtccgtgtccatttttgcttctattgtttttgacacataataattgtacatatttatgggtatagtgtggtattttgatacatgaatgcaatgtgtatggttggtttttttattgttgcgttttaggagttctctatatattctggacactaatccctcatcagatatatgatttgcaaataatttctcccattctgtgggatgtgtttatactctgttgatattgtctgttgatgcacacattttaaagttcttatgacatacaatttgtctgttttcttttgttccttgtgcctttgatgtcatagccaagaaatcatcaccaaatccaatgttgtaaagctttagccttatgttttcttctaagagttttatagttttaggttttacttttcggcttatgatccattttgagtttttttttttttttgtatatgctattaggtaaaggtgcaactcattcttttgtgtgtaaatatccagttccttagcaccatttgttgaaaagattgtctttccccattgagaggtcgtcttcttgttttttttttttttttgagacggtcttgctctgttgcccaggctggagtgcagtggcgtgatctcagctcattacaaccttcgcctcctgggttcaagcctcagcctcctgagtagctgggattacaggcacatgccaccatgcctggctaatttttgtatttttagtagagacggggggtttcaccatgtcggtcaggctggtcttgaactcctgacctcgtgatcctcccacctcagcctcccaacatgctgggattacaggggcgagccaccacacccggccgaaaggtgtttatacccttgtcacatagatcatttgaccatatatatcatttgagtttatttctgggctctctgttctattgattcttatatctgtctttatgctaatgccatactgttttgattattgtagctttgtggtaagttttgaaatcagaaagtgtgaatcttccagctttgttctttttcatgattgtttggctatttccgatgtgatttgcaaatatttttttccactcactgggttgtctttttactttttctttgctgtgatgcccaggctagagtgcagtggcatgatctcagttcactgcaacctccgcctcctgggttcaagtgattcccctgcctcaacttcccaaggagctaggactacaggtgtgcaccaccacacctggctaatttttgtattttttttccagcagagacagagtttcaacacgttggccaggctagtcttgaactcctgacctcaagtgatatgcccacctcagtctctcaaattgctgggattataggccaccacacctggcctattttctttaaagagttttataggatagatgctgtggctcacatctgtaatcccagcactttgggaggtcgaagtgggaagactgcttgagctcaggagttcaagaccagcctgagcaacataggaagaccccatctctacaaattaaaaaagttagccaggtgtggtggtgcatgcctgtagtaccagctacttgggaggctgaggtgagaggattgcttgagcctgggaagtcaaggctgcagtgaagtgagttagagaccacagcactgcactggggcctgggtgacggagtgagaccctgtctcaaaaaaaaaaagttacatagctttagctcttaccatttaggtgtttgacctatcttgagttaattgttatgtgtgatgtgcggtaggggtccagctccatttgcacgtgtggacacacctctttataggctggggagcaggcattagaggtggagctacttgcttgccgtcacagctggcaagtggaggccaaagacagccgctgcatcctttctttgaactcttatacctgagggtcatttatctctgacctggaggacagaaacagaaagcccttgagcaggctgagcgcagtggctcacgcctgtaatcccagctctttgggagaccgaggtgggcggatcatgaagtcaggagatcgggaccatcctggctaacacggtgaaacccctctctactaaaaatacaaaatattagccaggcgtgatggcgggcgcctgtagtcccagctacttgggaggctgaggcaggagaatggtgtgaacccgggaggcggagcttgcagtgagccgagattgcgccactgcactccagcctgggcaacagagcaagactccgtctcaaagaaaaaaaaaagtccttgagcaataataaaactaggactctagggacattacttctcaggggcaggccacgccgtgcacctgtccacatctgtttccctccccttgctgaacaccagcccctgccctcgccagcctttctgtcctccttccctcctcctccccctaaatgttcatctgtggcttttgcctgtcccatggcacatgataggctctcgctgtctgggcctccctgggggtaggtccccacaggagaccttaccagggccatgccagacagctcagatgtctctgtgccctgccttgaatcctttggcctcagggctggaggttcagctatggcaggtcaggggctggcagctgagctgtgtgaggctgggagcttctctgagccttgggagagtaaaggaaaccaagtccctgattcaggagggccagagcattcctcttgctggctgtgtgcccatgagcccgggactgggagaaggcccaacggtacctgcccccatgggacttgttggctgggacctgggaaggcccgtggtctgtgtgctttgctgtaaaatgtatcactgggggactggaccatctgccgcagtctggcgctatcgaggagcaccccggccaccagcagagggcatgctgatcatagacactgcccctccctccctcccctcccgacaatctccaggccaccagttccagtcttaccttgagccactacctctcgggcacccagggctgctctggtggaattaatttgaacagtggtggcattgtagcgagtggatgctttggccttgtaactggtgccgttgtttgtttgtttgtttgtttgtttgttttgacgagtcttgctctgtcgcccaggctggagtgcagtggtgcgatctgggctcactgcaagctccacctcccaggttcacgccattcacctgcctcagcctcccgagtagctgggactacaggcgcctgccaccacacctggctaattttttgtatttttagtagagacggggtttcaccattttagccaggattgtcttgatctcctgaccttgtgatccgtccgcctaggcttaccaaagtgctgggattacaggcgtgagccaccgcacctggccattgtttacagtaagtgccaaactttgatgtttgtgtgtttctttgctgttttgttgctgtgttcactcaggtgtcgcttgtatttagaactcagcttttacaatggaattgcttttgatactacactttggtgtctcaggaaactacatcctgcatgattgatactctgtgcttcctttaatgacaggcaaatctcaccttgtcttgtaccttataaaagccaggctcttagaagtggtgacactcataaaccagcctgaagttgctgaattgacccatgttatctgacacctattaagattctactaagattcttaattcacccatatccagcttgaatttttacttgattttgcatttaattgcttccatgtacctactaagtttttacataatgtatttttttattatttaaatagagatggagtctcgctatgttgtccaggctggtctcgaactcttgggctcaagtgatcttcccgcctcagcctcccaaagtgctaggattataagcgtgagctaccacacttggcctttacatgtatttttttaatgtctttaatggaatataggattgatttaattgaagagtacatttagctttgtacaaaactgccaaactgtcttccaaagtggctgtgccattttgcattctcaccaacagtgaatgagggctcctgtgctccacatcctcaccagcatttgatgttgtcagtactttgggtttaggccattctgacaggcatgtagtggtgtctcagtgttgttttaatttgcagtttccaaatgacataaggtgttgagcatcttttcatgtgcgtatttgctgtctgtatatcctcttatatcaggcatctgttcgggtctttggccctctgccgccaccctcccaccttattattatttatttttattttttattttttagacagagtctcactctgtcgccatgttcgctctgcctcccaggttcacgccattctcctgcctcagcctcccgagtagctgggactacaggtgcccaccaccacgcccagctaatttttttttttttttttttgggatggagttttactcttgttgcccaggctggagtgcaatagtgccatctcggctcactgcaacctccgcctcccaggttcaagctattctcctgcctcagcctcccaagtagctgggattataggcacatggcaccacgccatgctaatttttgtattttttgtagagatgggattttgccatgttggctaggctggtctcgatctcctgacctcgtgatccacccgcctcagcctcccaaagtgctgggattacatgcatgagccaccgcgcctggcccctcccaccttatttttaaagagtcttgctctgtcaccgaggctggaaagcggtggtacaatcacggctcactgtagcttcaacctcctgggctcaggtgatcttcctacctcagcctccctagtagccttgactacaggtgcaccctactgtgcctggctaatttttttgttggtttgtttttgttttagaccaagtttcttgctgtttttcctcaggctggagtgcactggcgccatctcagctcactgcaacctcctgactcccaggttcaagtgattctcctgcctcagcctcctgagtacctgggattaaaggcgcctgccaccacgcrtggctaatttttgtacttttaatagagacagggtttcaccatgttggccaggctggtctcgaacttctgaactcaagtgatccgcctgccttggcctcccaaaatgctgggattacaggcgtgagccactgcgcccagcacctggctaatttaaaaaaattttttttttttttttgaggtggagtctcgctctgttgcccatgctggagtgcagtggcacaatctcggctcactgcaagctccacctcccgggttcatgccattcttctgtctcggcctcccgagcagctgggactacaggtgcccgccaccacgcccggctaattttttttgtatttttagtagagacggggtttcaccgtgttaaccaggatggtcttgatctcctgacctcgtgatccacccgccttggcctcccaaagtgctgggattacaggcgtgagccactgcgcccggcctaaaaagtttttttgtagagacagggtctccctatgttgcccaagctgatcttgaactcctgggttcaagcgatccttctggcttagcctcccaaagggctggaattaatctccaagcagggattgcaggcatgtgccaccacacccagctaatttttggggtttctctacgttggccagactggtctctaactcctggcctcaagtgatccgcccgcgtctacctcccaaagtgctgggattataggcatgagtcaccgcgcctggcctcttattgttgagttttaagatttctttgtatattttagatacaagttgtttatcggatatatgttttgtaaacattttcctcagtctgtggcttgtctccattatctttttttttttttttttgagaggagtctcgctctgtcgcccaggctggagtgcagtggcgcgatcttggctcactgcaagctccgcctcctgggttcccgccattctcctgcctcagcctcctacaggcgcccgccaccacgcccggctaattttttgtatttttagtagagacggggcttcacagtgttagccaggatggtctctatctcctgatcttgtgatccgcccgcctcggcctcccaaagtgctgggattacaggtgtgagccaccgcgcccggcctgtctccattatcttaacagtgtctttctcagagctgaaatctttaaatcaataaagtgggaacttcagccatgtaactgatcaggatgaacaggggaagccatcgttttcagcagatgccaaacttggtttttctcctctgactcttgacgtggttgttcccttcaactggccgagacctaggggctcactgatgccggggtttgtcctaggttagacggggagtctgtggaatagtgtagggtgtcccagccacggagaactctcagcttggcagtttaccctccatttacaggtgaagacactgaggccctccaggcgcagtgacctaggggtgtgtggcaggtggggcagggaccccagtagagtgcagacctcacctccttggccatttccacctgcccctcatccaccatgtggcctgcaggtggtgcgtggcaggttgtggtgcttgatctccaggatgttgggcaaggcagagtccttggcccccacgctgtggagctcagcttctccccacaggccccaagcctgtgtgttcagggcatcctccttgacatttggagagtgagactcagggtggccgtactgacccactggccccatactctggaagtacttagggcctgctggtctgcccactgagggacatgccttcagtccccatgggcctgtgggagggctttaaccagtgcctggctgggcagggctcttagtcttagtgactccctaactggagctcccagggccatttggccacctccctcccgcctctgtttgggctgagggacgtgggcgcagctgccagcatggggaccaggcctctgtcctcaggtgacttcatcgcacctgctgccaccttcccttgcagaaattggcagaattccaggaaacttgcccagagtaagtgcctcaagtagaaacaagcccaatgcatttgccatggatatttaattctctaaaaggcagaggtgggaggtgaaagagatacttatttaaacagagttatacaggaataatttctataactgcacatatggaaagtattcagtttgatcagttttgacctaggtacagacagacttcctttcattgcactttgcaggtcctgcatttttttttttttttttaagatggagtttagcttttgttgcccaggctggagtgcaatggcacgatctcggctcactgcaacctctccctcctggattcaagcgattctcctgcctcagcctcctgaagggctgggattacaggcgcctgccactgtgcccagctaatttttgtatttttagtagagacggggtttcaccatgttggtcaggctggtctcaaactcctggcctcaggtgatccacccaccttggcctctcaaagtgctgggattataggcgtgagccactgctcccagccaggtcctgccttctttacaaattgaaagtttggggcaggcgtggtggctcaggcctgtaatctcagcactttgggaggccgaggcaggcggatcacctgaggtcaggagttcgagaccagcctggccaacatggcgaaaccccatctctactaaaaatataaaaaattagctgggtgtggtggcatgtgccgtagtcacagctacatgggaagctgaggcaggagaatcacttgaacctgggaggcagaggttgcagtgagctgggatcatgccactacactctagcctgggcaacagagcgagactccttctcaaaaaaaaaaaagtttgtggcaaccctgcattgagcaagtctattggcaccatttttcggccagcctgtgctcatgtagtgtgtctatatcatattttggtaattcttgcaatatttcaaactttttcgttatcatttttgttatggtgatctatgaccagtaatttttggtgttactagtgtaattgttttgagacatcacgaaccacgtccatgtaagacagcaaatgaaattgataaatgttgtatgtgttctgactgccccactgaccggctatttccccatctctctcccttttcgtgagctccctcattccctgagacacaacaattttgaaattagaccaattaataccctacctctagtgttccagtgaaggagagagtcacacatctctcactttaagccaaaagccggaggccaggcacggtggcacatgcctataattccagcactttgggaggctgaggcggttggatcacttgaggccaggagttcgagaccagcctggccaacatagtgaaacgccatctctactaaaaatacaaaaaactagccaggtgtgttgacatacgcctgtagtctcagctactcagaggatgaggcagaagaacctcttgaacccagaggtggaggttgcagtgagtcaagatcgtgccactgcactccaacctgggcgacagagcgagactctcaaaaaaaaaaaaaaaaaagccaaaagttagacatgattaaacttaggaaggcatgttgaaagctgagataggctgaaagctaggcctcgtgtgccaaacagttagccaagttgtgaatgcaaaggaaaagtccttcgaaggaaattacaagtgctgctccagtgaacacatgaatgataagaaagcaaaacagccttcttgctgataacggagaagaagaattttagtgatttggagagaagatgaaatcagccacaacattcccttaagccaaagcctaatccagagcaaggccgtaactctcttcaattctatgaaggctgagagaggtgaggaagctgcagaggaaaagcgtgaagctaacagaggttggttcatgaggttgaaggaaagaagccacctccataacatgaaagtacaaggtagagcagcaggtgctgctggagaagctgcagcaggttatccgaatctggctgagatcaccggtgagggtggctacacaataggttttttcttttttttttttttgacacagagttttgctctgtcgcccagggtggagtgcagtggtgcaatctcggctcactgcaacctccacctctcaggttcaagagattcttctgccacagcctcccgagtagctgggtctacaggtgcacgttaccacacctggctaatttttttatttttagaagagacaggatttcactatgttggccaggctggtctcgaactcctgacctcaaatgatctgcctgtctcagcctcccaaaatgctgagattacaggcgtgagcccctatgccctgcctaggttttcagtgtgggtgaaacagctttctgttgaaagaagataacatctaggactttcatagctagggaggaaaagtcaatgcctggcttccaaggacaggctaggtctggtgactcacgctgtaatcccagcactttgggaggctgaggcgggtggatcacttgaggtcaggagtttgagaccagcctggccaacatggcaaaaccctgtctctactaaaaatacaaaaattagctgagtgtggtggcacttgcctgtagtcccagctactcaggaggctgaggcaggagaatcgcttgagcccaggaagtagaggttgcagtgagccaagattgcacctgccacagcactccagcctgggtgacagagtgagattctgtctcaaaaaaaaaaaaaaggacaggctgactctcttgttaggggcttatacagctggtgactttaagttgaagccaatgctcatttactattctgaaaatcctagggcccttatgaattatgctaaatttactctgcctgtgttctataaatggaacaacaaatcctggatgtcagcacatctgtttatagcatagttttctgaatatttttaagcctgccgttgagacctactgctcagaaaaaagatttctttcaaaataatactgatcaggccgggtgcggtggctcacgcctgtaatcccagcactttgggaggctgaggcaagtggatcacgaggtcaggagttcaagaccagcctggccaagatggcgaaaccctgtctctactaaaaatataaaaattagccaggcgcagtggcaggcgcctataatcccagctactcaggaggctgaggtaggagaatcacttgaactcaggtggcagaggttgcagtgagccgagatcgcaccactgcactccagcctgggcaatagagtgagactctgtctcaaaagaaaaaaaaaaatcaaaataatactaatcattggctgtgcgtggtgactcatgcctgtaatcccagcactgtgggaggccaaggtggttggattacctgaggtcaggagctcgagaccagcctggccaacatggtgaaaccccatctctactaaaaaatatacaaaaattagttgggcatggtggtgcatgcctgtaatcccagctacttgggaggctgaggcaggagaatcacttgaaccagggaggcggaggctgcagtgagctgagatcgcaccactgcactccaggccaggtgacagaacgagactccatttcaaataataataataataataataataataataataataataataataatwctaacactgctcattgacaatagacctgataaaccaagagctctgatggagatgcacaaggagattaattttgttttcgtgcctgctggctttagtccatttgtgtggctgtaaaggaatgcccgaagctgggtaatttatgaaggaaagagctttatttggctcatggttctgcaagctgtacaggaagcatggcaccagcatcttcttctggcgagggactcaggccacttctacttacagcagaaggggaagggaagctggtgtgtgcaggtcacatggccagagaagtgagagagaagggaggtgccaggctccttttaactattagttctcccagaggctaataaagtgagaactcactcatgaccacgaggatggcaccatgcccttccagagggatccatcctgtgacccaaacacttcctattaggtcctgcctccaacattgggattgaatttcaacatgaggttagggatcctcatatccaaaccatagtggataatagcacctattaactcaacatccattctgcaacctatggatcaaggagtaatcttgactttcaagttgtattgtttaagaaatgcattttgggcctgtaatcctaacactttgggaggctgaggcaggtggattgcctttgttcaggagtttgagactagcctgggcaacatgttgaaatcctgtctctacaaaaaatacaaaaaattagccgggcgtggtggtgggcgcctgtagtccaagatacttgggaggctgaggcaggagaatggcatgaacctggaaggcggagcttgcagtgagctgagatcgtgccactgcactccagcctgggcgatacagcgagactccatctccaaaaaaaaagaaaaaaaagaaattagctggacatggcaacatgtgcatgtagtcccagctactcaggaggctgaggcaggagaattgcttgaacccaggaggtggaggttgcagtgagctgagattgtgccattgcactccagcctgggcgacagagtgagcctccttctctacaaaaaaaaaaaaaaaaaaaaaaagaaatgcattttgtggggctctggctgccatagtggttcttctgatctgggcaatgtaaattgaaaaatttacattggaaagcattcactattctagaagccattaagaatatttatagaccaggcgaggtggctcacgcctgtaatcccaacactttgggaggtcaaagtgggtggatcacctgaggtcaggtgttcgagaccagcctggccaacatggtgaaacctcgtctctactaatacaaaacgtagctagatgtggtggcatgtgtgtgtaatcccagctactcaggaggctgagtcacaagaattgctttaacctaggaagtggagaggttgcagtgagccaagattgtgccattgcactccagcctgggcaacagagcaaaaaagaaaaaaaaagaaagtggtttcttaagatggaatgtagtcttggggaagatgccatgaacattgctgaaatgacaagaaagtaatggcaatggtgggccatctggagcaacccctgccctcacgccaggtgcagtggggtggtgcaagcagtggtggcaggagcagctgtgggagcagcagtggcagcagcagtggcagcagtgggtcccctgtgccctgcattccccgggcagctgactgcaccgcccccatccttgcacagccaggcaggacctgctcccaggcctggagccttgccgctccagaccctggctcagtgtcagagctcttacccgctctcactgtggggaggggtgtgcagaggaaatagtcagtccctggagtctacccctgggagtctcccagagcccactgccctgggagccaccacaacggggccaggctgagttgcctgctggtggggaagcagcatgattgggcatggaggtgcgggcagagaggggccccaaggtggagctgggcctggggtgatgctgcacctgcatatggagtgtgggggctgggcctgggatgcagagcttgggttatgcttcagggccctggggcgggaagtgggagcggcattcactttggggacctggactgcggtgcagccaccgcacccaccctgctgatggtgcccttcagactttgggcaccaacaggcatgggagggaggccaagtgggggctgaggataggctggcacaaacagcctggatgccatgaacagtggcgagagacagacaggctcctgggtagaaggggtctggtccccagtgaagcctcaccttcaaactggggagggcctgaagcctgggggttggctggccagtcccgaggaccagaggggaagcttgtggtgctttttgctggcccacccatggaccagtcaacacacacttcctccactctgaggcccataaaaaccccggactcagccagactagagcagaggacagaaagatgacaggatgaccagctgcaaagaagagctaccctctctgctgagagctgaacactcactgggatgacctggctgtgactcaataaagctcctctttgtcttgctcactctccatttttctgcgtacctcattcttcctggtcacagggcaagaactcgggacctgccaaatggtgaggctgaaagaactgtaacacaaacagggctgaaacatgccccttcttgccacgttgccagtgaagggaaggaaagaagagctgtggccctttggggagtccagacctgggagctccctgagtcagggttgtgactccctctttggggccctgcagttcctggcgtcaccaagcttccaggcaccacagcattcccgtgtgccaaccaggcaagctgcttgaggtgcgcttggtccaggtgcagccttgcagagaaccagcacctgtgccagcatctggagctgcctgccctgcagcagcagctggcatgtctgactgtgcagtggccgtactccatgctcactcacacactgctcgctgctccacaccaggcttgtccttggcaggcatgggagctccaggctggtagcatgagccaagcgcagcctgccaggctgagtgggtggaataagcccagtgggccccagcaaaacttaggcaaaggtgccacaagacacagaggtttctggccagaaaagggataccccaaagatcccataacaaaaggatttagaatattccataaacttagttgataaaacaacataggttttaagaggactgactccacttttttttttttttttgaaatggagtctcgctctgtcgcccaggctggagtgcagtggtgcgatctcagctcactgcaagctctgccttctgggttcacgcaattctcttgcctcagcctcccgagtagctgggactacaggtgcctgccaccatgcccagctaatttttttatatttttagtagagaaggggtttcaccatgttagccatcatggtctccatctcctgacctcgtgatccgcctgcctcggcctcccaaagtgctgggattacaggcatgagccaccgcgcccggcctgactccacttttgaaagttctactgggctggtctaggagatcgagaccatcttggctgacatgttctccccatctctactaaaatacaaaaaattagcctggtgtggtggtgcacacctgtagtcccagctactcaggaggctgagccaggggaatcacttgaactcgggagacggaggttgcagtgagccgagatcatgccactgtactccagcctggctgacagagtgagactctgtctcaaaaaaaaaaaaaagtaagttctactgtgggtaaaatgctatcaaacattgcatgctacagagaaatctttttttttttttttatttgagataggctcccactctgtcacccgggctggagtgcagtggtgcaatcacagctcactgcagctttgacctcttgagctgaagggatcctcccacccttagcctctcaagtaactgggaccacaggcaagtgccaccatgagtagctaattttttaatttttatttttagagacagcatctccttatattgcccaggctggtctggaactcctgggcacaagcgattctcccacctcggggtcccaaagtgctgggattacagacatgagccaccgtgcctggcccagagaaatattttgtggaaagaagggtcaattgatgtggtcaatgtcattgttgtcttattttaaggaactgccacagccatcccagccttcagcagtcgccatcctaatcagtctgcaggccgggcggtaatcccagcactttgggaggctgaggtgggcggatcacctgaggtcaggagttcaagaccagcatggccaacatagtgagaccctgtctctactaaaaatacaaaaaattagctgggcgtggtgacgcgtgcctgtaatcctagctacttgggaggctgaggtaggagaaccacttgaacccgggaggcagaggttgcagtgagccaagatcgtgccactgcattccagcctgggctatagaatgagactgtctcaaaaaaaaaaaataaaccccaaaacaatatgaatcagtctgcagccatcaacatcgaggcaagactctgccagcaaaaagaataccactcactgaaggctcagatgattgttagcattttttagcaataaattttttttttttttttgagatggggtcttgctctgttgcccaggctggagtgcagtggtgcgatctcggctcactgcaagctccgcctcccgggtttacgccattcttctgcctcagcctcccgagtagctgggactacaggcgcccactaccatgccgggctaattttttgttttttagtagagatggggtttcaccgtgttagccaggatggtctcgatctcctgaccttgtgatccacccaccttggcctcccaaagtgctgggattacaggtgtgagccaccatgcccgattgcaataaagtgtttttaaatgaaggtatatacttttttttaaggcataatgctattatacacttaatagactacagtgtaacttttacgtgcactgggaaaccaaaaaaatcatgtgacttattataaagtgcaatgtgtgctttgttgcggtgatctggaaccaaacccgtaatatctctgaggtatgcctgtgtgagcctgtgaagccttcaccacaatcaagaccgagactgtgaacagacctgtcaccctgctgaggccctctgcttctctggtccctccctgcccccaggcaacctctgatctgctttctgtcactatagtttgtgtttcctccaagtttataaacatggacttgcacagttctctttttgtccagcctcccttgctcagcacgattacttggagattcatccacatggttgcatgtatcagttattcattcctttcctttttttttttgagacggagtctcactcttgttgctcaggctggagtgcagtggggcgatctcagctcactgcaacctctgcctcccgggtttaagcgattctgcttcctcagcctcctgagtacctgggattacaggctcccaccaccatgcctggctaatttttttttttttttttttttttttttgagatggagtctcgctctgtccccaggccggagtgcagtggcgtgatcttggctcactgcaacctccgcctcccgggttcaagtgattctcctgcctcagcctcccgagtagctgggactacaggtgagcgcaaccacgcccaactaatttttgtatttttagtagggatgaggtttcaccatgttggccaggatagtctcgatttcttgacctcgtgatctgcccacctcggcctcccaaagtgctgggattacaggcgtgagccactgcgccaggccaaatgctgggcttttttttttttttgagacagagtctcttgctctgtcaccctggctggagtgcaatggcatgatcttggctcactgcaacttctgcctcccggcttcaagggattctcctgcctcagcctcccgagtagctgggattacatgcatgcaccatcacgcccagctaattttgtatttttagtagagatggggtttttccatgttggtcaggctggtcttgaacgcccgacctcaggtgatccacctgccttggcctcccaaagtgctgggattacaggtgtgagccaccacacctcgccgataattgcttttagatgttacttttgtattttcctaatgtctaatgatgttgaatatcttttctttttttctagaggtggagtctcgtcttgttgcccaggccggcctggaattcctgggctcaagtgatcctcctgcctcagcctcccaaagtggtgggattacaggtgtgagtcactgcatctagccttttttgagacaaggtctcgctctgtcatccaggctggaattcaatcttggcccactgcagccttgacctcccagctcaagtgatcctaccacctcagccccctgagtagctgggaccacaggtgcagctgggaccccctgagtagctgggaccacagaaaacccacagggtcggtggcttttctccccatgtggggagatgagagattgtagaaataaagacacaagacaaagagataaaagacagctgggcccgggggacaactaccaccaagatgcagagaccggtagtgtccccgaatgcctggctgtgctgttatttattggatacaaggcaaaaggggaggggtaaagagtgtgaatcatctccaatgataggtaaggtcacgtgggtcacatgtgcactggacagggggcccttccctgcctggcagccaaggcagagagagagggagagagagagagacagcttacgccattatttctgcatatcagggacttttagtactttcactaatttgctactgttatctaaaaggcagagccaggtgtgcaggatggaacatgaaagyrgactaggagcgtgaccactgaagcacagcatcacagggagacaggcctccggmtaactgcgggcaggcctgactgatgtcaggccctccacaagaggtggaggagtagtcttctctaaactccccgggggaaagggagactccctttcctggtctgctaagtggcgggtgtttttctttggcactgacgctactgctggaaccacggtctgcctggcaacgggcgtcttcccagacgctggcgttaccgctagaccaaggagccctctggtggccctgtccgggcataacagaaggctcgcacttgtcttctggtcacttctcaccatgtcccctcagctcccatctctgtatagcctggtttttcctaggttatgattatagagcgaggattattataatattggaataaagagtaattgctacaaattaatgattaatgatattcatatataatcacgtctatgatctagatctagtataattcttactgttttatatattttattatactggaaaagctcatgcccttggtctcttgcctcggcacctggatggcttgccacccgcagtgctcaccaccatgctcggctaatttttttggatttttggtagagatggggtctcaccatgttgcctagaagagtctccagctcctgagctctagccatctgcccacctcagcctcccaaagtgctgggattacaggcgtgcacgaccgcgcctagccaaaggtcatttgtttttttcacattgagctctgagagatctttctggagcctggatgtaagtttctgaccctaccagcttcctctagcatgaggcagtgagtttcggttggggagagggatgtggcctcccattctagggcatgtcgttgcggagttctccttgaattctctcttccgagtgccctctgatgagctgggctcagtgtgcttttgagttctaggtgcctgtctcatttcctaccttctttctatatgcttggctgcctgggtaggtatgggagggatgggggaagaggtgctgccatctcttgacttttttttttcttttttttttttgagacggagtttcactctgtcacacaggctggagtgcaatggcacaatcttggcccactgcaacctctgcctcctgggttcaagcgattctcttgccttagcctcccaagtagctggcattacaggcgcccaccaccatgcccggctaatttttgtagttttagtagagacagagttttgccatgttggccaggctggtctcagactcctgacctcaggtgatccgcccgccttggcctcccaaagtgctgggattacaggcgtgagccaccatgcccagcccacctcttgactttttagcttccagatgcctttgaaagctgcagaaaactgggtcttttccccagaaaagtagaaaccagacacaacctcgagcatgtttttagggatgctcacagcctactgagccagttctactttgttttgggttagagatggatgccacatctgcagatctctgccaagctgtgtgtgtttttctttagattttgggagtgcctttctgtggcaaaggtaagagcgtttcgagggctcctgccatgtgtcacccacatggccagtgcttatgtagggaggggccacagcttctggcatccagttgttagtagtttatttatttatttatttttacagagtcccgctctgttgcccaggctggaatgcagtaacgcagtgacgtgatcttggctcactgcaacctccgcctcctgggttcaggtgattctcctgcctcaccttccctggtagctgggattgcaggagcacaccaccatgcctggttaactttcttttcastagtggtggggttccaccgtgttggccaggctggtgtcaaaactcctcacctcagatgatccgcctgcctcggcctcccaaggggctgggattacaggcgtgaactactccaccctgccttgtttgtagtttataacagctttcctgagctataactctattgagtctaccctttttgattgtacaattctgcgtgaaccttaatggattcacaaggctgtgcagccaccagcacgatttaattccagaacattttcatcacccccggaattaacctgcacgcattagcagtcactcccatttcccctcctccagcccctgccccccaccagctgactttctgtttctgtagatctgcctgttgtggacatttaatatacatggaatcagatggcgtgtgaccttttgtgattgacttctttcacccagggtggtttcaaggctggtccgtgcattactgtggatctgtaggtcttcattttttatggtcagataatatctcattgtatggatttatcgtattttgtttacctacccatccgtggtggacaccgggttgtttccrtccttgggtggttgtgaataatgctgctatgaacatttctagacatctcgttttgtcaattaaaatgatttttaatttactagatgggaaatagcaccttgtagttgtttaactttgagattatttactcataaggctaagctatctgagaagtgcttcctctttgcgggaccatctggttgtggcttgaatctgtgttgctgtggaagcctggtaggtcctcactgatttggggtgggtggtgggcctagcacacctggactgggaccagctggaagggttgcttagggaggcagcaatgcccgcctggagggatgaggccaagtccaaagggcacagtattggggcccaggctcattccttgagttccatttggctgcagcttctggagggagccgacaggagacgtggggagacgatgctcctgcttcggagaagcttgtcactaaacgtcctcagaaaggaagtcgacagggcctgttttggggagaaggccaaacagtgagttgggagctgagaggaactatgggctatttggggtcaggggagggaagtgtgtttgggaggacctgtcctgtgtgccagggtgggagacgctgtggcttcaagaccctggccctgggatgccggctactcaggawgatgggccgagatgggcagccagggggctgaggaggctgatggcccgggcctgggccccggcaggctgcctgggtggggagggctcagggggcattttcagccagggttagctgccaggcttgggccagactcagccctctgacctcccctccgggcagacattttgggtcggtgggatccctttagaatcctctcctctgctggcttctagacattaagcatccctgggcgggggcagcaccagcctccctgtgggacccagtgcgtgtggggtttgtaagctgaaaatgactttttctttctttttgcacataggtgagaggacttgtccttttaggacttgttatttttgcacataggtgaaaggacatccttttagtaataatttacctatttaacttttaccagagtgacttcccaggctcagtgcctgccagctggttagatagaataagcccaggctctggcagtttgataagggccttgataagggccggctgttccagtgggagtggcctaatcagccctctctgccctaactttctctttcacaactaaacatgtgaaacttgcccagaggcyggcgggtgcagcckggttgaggctgtgcggcctgcactctggctggggactttccatttcccttgctggtcacaggattcctgggaaagcagccctggtgggggcagcattgggggaggttgtggtgataacacatcccgcctcctgcactgggcctcctgtagcctgcaccctggccgctgtgattgtttggcctctttctttcttcctgacacccagtagaaggggaggcggagtgaagagagtacgggttggggggcacagggcccacaggtggcagccggcagcctaagagcccgcgggagtggaggaagggtagtggagttgctgagccccaagacaggcatggcatcctctgaagcaggggttgggggaaggaagagggggagtggggaaggacaggggtgtggcctgaggagaggggaggctggaccgcctgtccactttgcttcagccagggagctggcccttgggacaggctttagatgccagctccatcagcaggatgcaggcttggacctgctggagtccttgctggcctgtgaccttcctcccctgtctacatttcagggagctctagaaggcggcagtggggccagacctggctttggctgagaccctggagaaagactagggggtcttgtgccctgtcagagaaggcagagcctcatagccgcttccctgaggccgctcagcagcggcccctctgccttcctgatctcctggcatggcagccagaagagctcacagaattacttcttctgtaattatttataaagcaaggtttccatgacgaccggtttctggtagacgctctggattggcgaggcagcctcttcctggccagattgggcagctcaggaagctgggggtggggggtgctccccaccaagcccggtgtggcagggagctgggacagtcctgggtcaggcaaggactctgtgatgcttccctgctccctcgcctttctctgcatctgatcctgggatgtcctagccaccatggctttccagctgagcaggtactgccagtcatgggcatgtctaggccgtgcaggggccactgtgggtggattgtttagggacatttggaagggaagggtgggtagaggggactcggcccctgtgcccagcaggctggctggtgtcatgcagccaggaagggcagtagggcacccacctggcctggctcttactgacccccaagattaggtggtcagccgaagctgggataggaagtgcaggcctgcgtgagctggggtcccctgacggaccagggcactcccctgcctgctstagtccccagggaggaaggcacctggttttctttccagccttgctcctgtggcttccctctgctcccttcagctgggctgggttcactgcggtttcccagcgctgctgagcttcctacctgcggtggagggggggtctrtgggctgcacaaggagcctcctgggtcagtcccctgcccctggccaaaatggaggctgggagctcagggccattgttggcctcttcccccgtcctgcttgggggcctgcaagtgctgctggaactttccttggcacagcccttcctcccacccttccctcttctggagatgcagtggcgtgtctgtgggttgaagggacttcgccggaactgccttaggcagcaagtcaaagaggagaagcaggggccagactctgtgactcacgcctgtaatctcagcactttgggaggccgaggcaggtggatcaactgaggtcaggagtttgagaccagcctggccaacatggtgaaacccccgtctctactaaaaaatacaaaaattagccaggcatggtggcacgcacctgtaatcccagctacttgggaggctgaggtaggagaatcacttgaacccgggaggtggaggttgcagagagccaagatcacgccactgcattccagcctgggtgacagagcgagactccctctcaaaaaaaaaaaaaagaggagaagcagggctgcttgagcttctgtttggcagagtcccccatggaaagaggaggcatttatgtgtgcttgtgcctggactttgaggccccacacccatccacgtgcctgttttgtccctcaaggctgcctggtgtgaggcccccgccccccatgccataaggagacccgcttctcctttccttccgggaagggcaacccctgtcccttgtctactcctggccaaggcagcctctgctgagctcctgaaggaagctccgagtgtctgcaggccccaggtggtggcccccagccatgagtggcatctgcagccctatgaytggggacagtctgcccagacacctctgtcccacccagctttccagctgaggtgagggtggagcacacgcacctggtgcttgacctctggtttgaggcctttgtcagaagggggcagtaatgagccgcctgccctgcaggccccgtgtgggcctgacctgcctataccccagacccttacctggctgtgcaccttcaggtgggcactttagcttccaccatggagtaaaggaagcaaggctcacctacccctggttaccctgggtttcacgtagtaatgttttcattttagcactgactttttttttttttgaggcggagtttcgctcttgttgcccaggctggagtgcaatggcgcgatcttggctcaccacaaacttcgcttcttgggtttaagcgattctcctgcctcagcctcccaggtagctgggattacaggcatgtgccaccatggttggctaattttgtatttttagtagagacagggtttctccatgttggtcaggttggtctcaaactcctgacctcaggtgatccacctgcctcagctcctaaagtgctgggattacaggcgtgagccactgcgtccagccacaaaagtgtagtcgtcgtcgtccttttttttttttttgagacacagtctcaccctgtggcccaggctggagtgcaatggcatgatcttggctcactgcaacctccgcctcctgggttcaaacaattctcctgcctcagcctcccaagtagctgggattataggagcctgccaccacgcccagctattttttttctatttttaatagagacggggtttcaccatgttggccagcctggtctcaaactcctgacctcatgatccgcccgcctcggcctcccaaagtgctgggattacaggtgtgagccactgcgcttggccagcactgacatttttgtgtcagagtcagagacactggtgacactcccagctggtcgtgtgctgggctgtggaaggggcaggcagggttcagtgccctgcagggctgctgccaaggtcaccgcacaggggcctgtccagggctggccaggtgtgggtggcaggwgctgagctgggctgagggtgctgagcggggctgagggtgctgagctgggctgagggtgctgggcagggctgagggtgctgagggtgctgccgctgctgcctcggggctcccctgtgccaytcagtgctgctttctttgggagcatcagagacctccgggcatggccacaaaccaggtggcaggtgacaaccggaagcagtttyctcaggctggagaccagcggtgggcagggccaygctccygaaggtttgacgggaggctgctcccgtctctgccttcatcttcacctggacctcctgtgtctcatgtcgagacttccctgttcctataaggacaccagtcattgggttagggccctycctaaggcacggcgacctcatcttgattgtatctggatgcaaagaactcttttcaagtaaggtgacattcrtagtttctgggggttcgttctcaaacacatcttttgggggacacaattcaacccagtactcaggctccatgtggcttaggtgggactccaccttgagaggaccccagggcacaggaggcatggccagccctcaaggtgaggccagggggcaggagcggctcccctccctgccaggctcccctcaattgttccaggcgcctcactcccgctgcggaacaggctcgggctgtcctgcgaggatgtgggctggaccccagggccgctgctgtaggcgctcttgggatgagtgctggccggcctctggtgtgatgagatctgagttttgagctgtgccttgaagcgttttcaaagaacacttattaatttgaaagggttgagatggtttaaaggcatccaaaagacacaggcatctcaccgaggtccctgcccagtagctagtttcttcctctgggggccatggaggcctctggtttgtcacacctccttcctggartggtcgtccctgcgccccaggtggtcaccttgctcccatggctctgtgccttgctgtttttcacctgacagctggtctctgagaaggttcctcctcctcgtgcaaggctgagcaatattccaatgtgtggctgttgcttttatgtccttatgtggacatctcrgcgctggcccatgtcctgcgttatacacggctgtgcagtgagtacccttgcagtgcttcgtttaaccgtgtgtggaaacagctgtggggtaaatttctgcgagtggaatcctgggtcagggtgtccctgtgcatctggggtttgggtgggtggtgccgggtgccctctgtgagtgggtattcgcttacactcccctatttgtgaatggttccctgtccttcacaaagggtgggtcaggcgttgctgggacaggtagaacggtgggaagggccaggcgtgcctgctaagcmgcagtgctctggcaggtgcaggtcggagccccgcagggcagtgagagttgaggcggaaaagttcccaatccctgagagctccagatgccttactaggagattgagtctttattctgtagatgggaaaggccctggaaggtatggataagggagtgacttggtcctggggctgtgcagtcggggccagttaggatctcagccaaggcaagaggcaagtgcagaggccatggggggtgaggggcagtgcagaggccatggggggaacaagaggccagtgtagaggccatgggagggctagaggccagtgtagaggccatgggggggctagaggccagtgtagaggccatgggggggctagaggccagtgtagaggccatgggggggctagaggccagtgtagaggccatgggggggctagaggccagtgcagcggccacggggggtgagaggccagtgcagaggccatggggagtgagaggccagtgcagaggccatgggaggtgacctccccaaacagtgtctgattgtgtggttcctggacttcagcctccccagcctcccctcctttcaggatggatccagactttgtctcagccctgaggccctgcatgacagctgcgwccctgtctcaggacatcgcttcttcacccccttttgggccatgcgccagctttgtggggttgctttctgtttctggagctcgctgggcactcctggccttgggccccgaacattccctctcctcgtagccttctcggacctctgctcctggctcacccttcaggacttggccaaggtgtcacttcctctgggaagctttcccagagattaggtggggtggcgcccttctgggagtggctccttgacccatgtgtgctcagcttcctcagagcccttgtcatcagctggatgccacctccagaggggacaccggccgggagtggggtggctgagagtgggttggcagcatctgcgtccattagccttgggccccagcacctgccactcatgctacaaggactggacagacatggttctgatctgggacaggagcagctggaacagaaaaagggtggggctgtgggcccgggtgacattccagacctgcagtcagcccgggtcactggctgccaggacccggcaggcagaagatagagcgggggatgtttggggccaggcccagagaaagaaggcagccacgtaggaaaggccccaccctgggcagcttgctttctttccttgaagtttctggggtcagaggagggggaagaagtgcaggattagcgtgttgggggctgggggaggaataacatgtcagactcagcagtaaacagtcctccagaactgggccaggcctgtgccgttgcccgagctggcctgtgtctttctttatttttagataatttttaaccccaggaatcctagagatagacaaatgtatttctttcttttcttttttcttttgagacgaagtctcactctgtcacccaggctggagtgcagtggcatgatctcagcccactgcaacctctgcctttcaggttcgagcaattctcctgcctcagcctcctgactagctaggattgcaggtgtgtaccaccacgccccgctaatttttgtatttttagtagagatggggttttgccattttggccaggcaagtcctgaattcctgacctcaagtgatccgcccccgcctcggcctctgtaagtgctgggattacaggtgtgagccaccgcgcccagcagccaaatatatttcaattttttttttcttttgagacagcatctcactctgttgcccaggcttgagtgcagtggtgcaattgtggctcactgcaacgtactcttcccaggctcaagtgatcctcctacctcagcctccctagtagccactgcgcccagcctgtatttcagttttttaatagtaaagaggggccgggtgcggtggctcacacctgtaatcccagcactttaggatcacctgaggtcaggaatttgagacagcctgggcaacatggcaaaaccctgtctctagtaaaaatacaaaatttagccaggcgtggtggtgcatgcttgtaatcccacttactcggaaggctgaggcaggggaatcgcttgaacccaggagacggagtttgcagtgagccaagatcatgccactgtactccagcctgggtgacagaatgagacgctgtctcaaaaaacaaacaaaatagtaaagaggaacatgaagtgctttcggtacccgtgtctttattagaaatgggatcacgaacgaggtcaggagatcaagaccatcctggctaatacggtgaaaccccttctctactaaaaaatgcaaaaaattagccgggcgtggtggcgggcgcctgtagtgccagctactcgggaggctgaggcaggagaacccaggaggcggagcttgcggtgagccaagatcgtgccactgcactccagcctgggagacagagcgagacgccgtctcaaaaaaaaaaaaaaagaaatgggaaaacgaagtctccagtgagacgcagcagcttccctggctccctggcyctcacccctgcctgcctttagacagaggcagtcatgaccctgtcctgggatggacacggttggccttggccaggccatggggcggggcctgagagagtgacagagctgtttatgggtcctggaggctggctggatccagcggttcctgagctgtttggaaggaatgagggaggtggggaggggaagagggaggggccaggtgtggagcagctggtggtggtatgcaggatgggaaggaatcccagctgaggctgggactcactggctgccctggcttggagggaaggtgtctgatttggggaaagggagaaggggtaagtgagttgggctttgagccttgtgcattggaggtgacagcacagtccccaggcaggagtcaggtcctgtaggggagagggttgtgtctgaccttgagggcaggggctggcttcctgggtggtcagttggggagttaggatggtccttggtgcaggacccaaggtgccgaagaaaggcggccaggcccgtggtagccagctggygtgcggtctgcagttcctggcatgtactcctgatggcayarcgccaagtgccgagtcctcactttgttgccaggtggctccaggctcttcctcggggcctcaggcactgtccctggtcttctgtcttaaaggctacccacatatctgtcctgtcttcagtgcccaccgcatgaaagcacttcctccgctgctctgcagcccttggcccgsgtcttctctccctggccttgtgtcattcctgggggccagcctgctgtgtgtggctccacttcacagacaggcaaagtgaggcctgcagcagtcattcaggctgctctggaggctggctctgctgctcctgggaaatgctgggctgatgtttcctcactgctctagaaccaggagctgggccctgctctccgcacccacccacagccttggctagtgcccccaggacaggcctgtgtggaaagtgaccctctgcccgctgcagctggtgcggggaaggcccttcctactaagtggaaaacaaagggaagaggctgatagaatcattttgtgacttataattggctacctcataactcagacaaaaaaagcccaaaaacctttcatagagtaagttcaatttttaaaaacaaaggtattttaaaatgaacacttgagaagccaaatgaggtttcttgtgtgctctggggatcccccggccactgtgtcacgccgtgccggccgctccacaggcaactgtccctgagcctcccacggaaccttgggccctgcctgacctcagagccagaagccagttggcctaagtgggccctggtttgcataatagactctcacccagggtggaggggtgacactggggatgggcagctatgggtygctgggggacatctgtggtcatttgctctagaagtggcatcctgtggccagatggtgggtttcttggagcttccaaccaagttggctaaatacttaccaaaaagggaaaaattctcctagttaacgtgtggactatctactgtgtaccatgtgtctgccagcgctgttgtggagtgagtgtgcgatctgygtgatctcccagttaggcgaggcagtgttgtcattctacccaytgtacagatgagcacatggaggattgagggttctgacagcttgcccaggttacctagcaagtaagagccagagccaggaacrctcttggagagtgacttgctcagccttggagctgctagagaagcagagaggagatgcagacctggggagacgctgctcctggggcccccacactgkccagcaaggctgggcaggctacacaagctgcaggtggatgctggaccctggacctgtgcccgctgcctgtcactcgtctccaggcctcggcctgtgaaggcggctttcatcagctgggtgctgtctgggaaggtgccaggcaacttgccctggcaggactgccaagctggcttgttgggattccagagatttcgtggagctcccacactaccggctgctcacggcaaggatgaagttgttcctctttggggaagtgaggtggcgtttccattccttctgacctgggaggctccttgccttcaatccagggcctgattccacactgcccscgggacccacagaggagcttagcgcgcagtgggcaggcgctcacctgctgacagggcctggggtcttgaagctgcgactcatgtttagttctcagaacagccgtggctacctggcttctctgggactcctgacgggggtggtggtggtcccgggaatttgctcctagggtcacagtctgtgtgttggtcactgggaaccccaagggctgatcaccacctccctgccctgtggctttgcttaaaggtcttcaccatcagcccttccctgccagggcagtccagggacatgtggcttcagggggagaaagtgcccctctgccctccttctctctcatggaaacagcatctcagggccccttccgtggcctagcaggtggcaccccaccctgacgaacacaccacctaggaagagcccaaacattgggaaggttctctttcctccgggagccattgagccctttggggaccttctcccctccttggattgtcactgttgcacaaatggcatcctctccagaggcctcatcctgcttctcctctgccctaggatcatgcggccagatgatgccaacgtggccggcaatgtccacggggggaccatcctgaagatgatcgaggaggcaggcgccatcatcagcacccggcattgcaacagccagaacggggtaagggtctgggccccatacctctgggccctggaggccgcaccagtgtgagttcaggacaggagttccccggggagccaggcctgcagccttccctccccttgtgcactgggccttgggaactgtgggagaagtggcccaagtatttctgcaccggaccctcagagctatgcttggttttggcctcagccaggaggtgtaggaacccaccagagatgaagcgtcaagcaagctgacaggccctccctccaccactccccgccatgccgagtccyccgccaacctggccctgatcagaagcatgccccgcctccgtggggtggagtttattgtgatggccaacagctgagacataagaggccagacagcagatgtaggagaggtcccacctctgccctgaccaaccctggtggccatggcaccatagcaagtgccgtggctctctgtgacttggccacttcctggctttgaagctcacaggcctggtaccactgtgcccacaatgggagcagctctccacctgccccaaaattgtgtagctcgggagggccctgtgaccctaaagctggggacaaggggcacggtgtctagtgtcaacctcagggctgctgtaggacattcagccatccccagccctggggaggggacattttctctgaagggcggctgttggggggaagccagcccttgggtgctgaggacagggcgtctgccttggtgccgcagctgcagcctctgcactatggggctcggtcagcacaccttctgkggcctccagggaggcagagaagaggaagactcakccccagcttggagagtgggagtgtgaggtgcaggtccccaccatgggcacgggcataatgccactctatcaagaggccaagtggaagccacgtcagagaccagggaccagcggaggcactgtgagctctgagccacactgttgagatgcaggaagtggctgctggctctgtcagcctgggctgccggaactaagaccacagcctgctggcttgtgaacaatggaaatgcatttctcacagtcctggaggctggaagtccaggatcagggcgccggcagatttcgtgtctgttgagggcccatttgtttcctggttcatagatgtcacatcacttcctgtgtgtcctcgcttggtaggagtggctctctcaggcccttttataaggacactaatcccatttgtgagggctctgtccccattctctcatcacctcccaaagaccctgccttctactaccattcccttgggggttaggatttcaacacagggattttgggaggtggggacagccatgcagagcatggcacatgcattcagcctggaacagtgggtagggtgtgtttcagtggaggagtggaagctgtgtgtgtgtgcgtgtgtgtgtgtgtgtatctgcgtatgcatgtgtgtgtgcatatgtagaatgaaccaagccacagtaagtgcggatggttggacgtggatgtgggggatgtcgtgtggtacaggttcaggagtgggtttgctggcagygcctggtttaggaggggctcgctggctgggctgggggtagattgattctttggacccgaggctccggtgcagctcagtcacgttcagagagcaccctctggtggctgtggggagggtgggcctgagcctgagagcctggggcaggggtgagggccaagtcccaagttcctgttgcacccttccagagagagacagtgagggtccctggcaggaragcatggacacagggaaggaaaagtccccaagatggggaggaaagatgaaggaggggcttgggaggccagagggtgatgctgtcactcagaatcgtggaattattttgctgccatttggtcagcacttgacattctgcaaagctccagaatgcttcaggagctaaagtttagctcatggaatcctcacaacaccccggagaggcagctgttcttgtcttgtttttttttttctgagacagagtctcactctgtcacccaggctagagtacaatggtgcgatcccggctcactgcaatgtctgcctcccaggttcaagcgattctcctgcctcagcttcccgagcagctgggattacaggtgtgtacaaccacacctggctaatttttttgtatttttagtagagatggggtttcaccgtgttggccaggctgatctcgaactcctgacttcaagtgatctgcccacgtcggcctcacaaagtgctgggattacaggcgtgagccactgcgcccagctgctgttgttatttttattatcccagttgcatagataaggaaactgaggtacagagagattgaacacttgcttgaggccacctggggaggcagatggtaggtctgggctgtgactatacctcgaacctgtgctttgaacacttgcccctccttgctccttctccggatctggggctgctggagggacagttttgacacattggcttggagaagcctctgggaggctggtccccaggatggtgatccagaaattctaggcttaggagggggtctctgagttccaggcagccccagggcgtgggggtgagaacagtcccagtgcctagaagggctttgctggggccctaggtggggcaggggacccccgcatccacactcccctggtggtgccttccagtctgtggctggaagtcccaaggttctgtctctggctggggcctcttggccagcccatctggatgcctacttggcctgcttggccttgatgtgcaaaaaaacgacactcctgtccttgccccaggcttgcttctcccagcctccctcccctcagtaaatggtctctgcagcaccccggtgctcaggctcaaagcctggagcctctgtcagcctctctccctcccaaactcatgaggctctgggagcagatcccactgctctaccttccaggaagtccagatctgagcacaacccccaggcccacccccactttgggtccaatggtgctgctcttccgatcacccgatcacctgatcactgcagcagcctcctggcaggtcaccctgctggtccctgctgcctggtttgttctccagcagtagccagggagatgtggagtcagggcacagtgctgcctgctcagagccctccagatctcctgtttcgcccaaagccaaaggcacgtccgcacgagtccctgtctctgcctagcgcggctcggggacctcacctcctacatctctttctcaactctccctctggccacattggcttttctgcttcttctcggacttgctgggtgcattcctgccttgggcctttgcactggctttccccagatatccacagggccctgccctctcctcttctaggctctacataaaaatgttggaatcccagcactttgggaagctaagatggacaggtcacttgagctcaggagtttgaggccagcctgggcaacatgatgaaactttgtctctacaaaaactacaaaaattagccaggtgtggtggcctgtgcctgtagtctcagcttcttgggaggctgaggcagcaggatcacctgagcccaggaaggttgaggctgcagtgagttgagatcacatcactgctctccagcctggatgacagagtgagaccctgtttctacaaaaacaaaacacagcgtccggccatgcccctgatggcctggctccctctctgcttccagctgctgctccactcctgacctgctgtgcttgtacagagtggtagccccacgagggcaggcaggacttctgcccttggtttctccagactgagcatagagcgtgcttaggcatcatctgatgaatgctgggagctcgggcctggcaccgtcaaccgtcatggagagcgtccaccgagtaagcgcttacgatgagcccgcggccacgctggggctcacccttcctctccctgtgtagtcttcccagccacctgctgagacaggcactgttcttaaccctgttttacaagtggggaaactgaggcctagaacagttaggtggctttccagacagctgcatcctcagagctgccgtcagccagaagacggccggggctgggcatggtgatgagaccgcaccctctctgggccctcactggatgcygggcatggtccacgcacttgacgtttgtcaattgccttatccccgcatgtcagagagagacagctatccctgcctctcctgggcgtttcctaagcaccgagttcttcccattcgttatcccctcgaatctctgcagcagcctgttgggaccatttattatctgtgtttacagagactgagacgtggagaggttgtgtcgctgcacaaggtcacagagctagtaagcagtagagctaggatttgaacccagggcccagagctgttcttttaggctctgcctctgcagctgctgtcctggctggaagccctgtggccatgaggaacccagtgcctgtggtttgctgggatgcctgtgcctcacgggccgtgtgataccagttgcttttgagagcgtggcagagggcacttcygggcaggtgctgatcaggagctcgtgtctctgtcccagggcagggtggggcttttcctgctcctgcagtcctggaagcaggaggtgtggggctcatccgaggcactggctgctgggagatcttcccatggaacgcaaatacttgtcagtccatgtattgaagttttggatcacactggccttcagggactccctgggcctggtccagagccctgcccgctcctgggaagcagccgcccaccagcaaatcagagccgtcctgggtcccggctcctgccatctgtacccatcagacacacagagccacctctgcagcctcccaggctgccagatagtaaaacaaaatcctcccacagggtctcctgatagtgaaatgggaccgtggcaagactcctgtgtggatgcctgggagacattacttttcttcttcttttctttttttttttttttttttttttttttgagacagagtcttgctctgtcgcccaggctggggtgcaatggtgcggtctcagctcactgcaacctctgcctcctgggttcaagtgattctcctgcctcagcctcccgagtagctgtgactacaggcatgtgccaccacacccggctagtttttgtatttttagtagagacagggtttcactctgttggccacgctggcctcgaactcctgaccttgtgatccacctgcctcggcctcctaaagtgctgggattacaggcgtgagccactgcgcccggccctacttttttctttagtatgttaagctgggagagaaccaagctcaagggtcatcagtggccttctgccctatgaaggacaggcttgaagccatcaccaggtgtccccgtggcactgtggggaaggctactggatggttctgtgtgaggggtgtcccgagggacagcacagagaggtgcgctctgccttcctcctgcctcaagtcactctttgagtgaacctgcttttgtgcctcctctgagcgacccttggacctgcccctcacatcctggcctgcaaggcctggcagcctgcctctttggacctttgtccaygtctcccactgcgtccctgtgttctggtggctccccaccacctccccactcctgctgctctttcctctccctgtggtaccaacgctccccctacctcctcctgcctaacacctggtcttttaggcctcagctcagatgcctctcatctgaagtcacaccctgccttaacatcgttgggctgtccccatcgtggcgtggccccatttacttctcgtccgtccccccagctagaacccaggcttctctgacccacacccctctgtacacccagcactgagaggccccacagatgctgccagaaaccagctgcagagcagggaggtggaaggcctctgccccggaaaagcaygcgcccataggtctgtttgatctgtgtcagcatagcataccgtaatgtacttaatcaccctcaaacaacacacacttggcttcattccacttttaggtcttgcagacagtgcttggctccttccaagatgggcattgccctgcccagaggcggtgcctaattcttgcctggctctgtgcagccctgccctaacagcctttggccaatgggtggcgccatagccacatacattgacttgggggtgaaagagacagttccaggcatcgctttactgtgacctgttgtgagtagggcagggtttgctgggggacaagcccgtgcaaaccagaatggggaagcatcgggccacccttgccagctctagaacttttcttgcccrgccccagatgcagtcacagagtccctgcgcctgtgtgcaggagagtcacctgggaaagggctcagacagaggctcccagcctacctccaaagaagcaggtgctgggtttggggtgggccccggagcttgcatgttaaccccacctcagtgagtcctcatgtaggtgggtgagctgcatgtcggtgctttgggggcggcaggcggtaggtgggagagcacagacgcacacaccagggcttgaagtgactgccacatactctgtgtgctctgggacgcttgcctaatgtggcaccccttgtcggggtgctgtgaagatcacctgggccagtgatgtcggagctggcccaggcccctccctcacctgctccctgcccgccctgggaagcctgagggctcctcagtgtcatgctgtcaatgtcctaaggaagtgattgttgcagtagaaagtcatggcagtcctctgggaaatggagactcacattycccatggctcaaacacaaggtcatcttttgtgtcatttattcagcaaagatgagaaataagtcaattctgagtgttggtcaggatgccgtgaggtggcaaaggccaggccagtcactgctgttccgagaaacacttaggaccatatataaaagtatttgtccttgggcccagaaaataatcccaaatgcagaaaacggtttaagtgaaagggtgcccatcacagcattgtttgtaatgagaatcaactgggggtgccccacatctctaacagaagaagaatgttcaattccacctggctagcaattgaaagtaattttctaaaaaaaagttaggtgtggttgcatgtgcctgtagtcgcagctactcaggaggctgaggctggaggatcgcttgagcccaggaggagtttgaggctgcagtgagcatgattgtgcctgtgaatagccattgcattcctgcctgggcaacacagcaaggtcctgtctctataaatgataataattttacattggagtgctatgaaaaggaagtcactggaaaggataaggaagtctttcagacacagccaccgtctgagtgttcgtgtctctcatgtgttgaaattctcacccccagggtgatggtattagggggtggggcctttgggaggtgacgagggtatgggggtggggcttcatgaatgagatcaatgtcttcatgaaagggtcccgagggagctcatttgccccggccaccacgtgaggacacacgagaagcactgtctgtgaaccaggaagccggcccttaccaggcatggaatctgcccgtccctgatcttggaatgacccaagtccctggagacttcccccctccaggactgtgagaaataaatttctgttgtgtctaagctgcccaggctatggcattttgttctggcagcccaacgaactaagacccaaagctacagaggatgatccccagggtagatgaagagagaaaagcagggtgcagcaccacctgtccatgtccaccatctgggagccccaccatgtggttgtagatgcggagtccgatctgacacatgggacccagctgccaaggggtcctgtgtgacaggagacgaggtggccagaggtagacccagcaccataggcttttttgttccttttacattttgaatcatgagaatgggtcgcctatttgaaggataaataacattgaaaaaaatttttttttttgagacggagtctcgctctgtcgcccaggctggagcrcagtggtgcgatcttggctcactgcaagctccgcctcccgggttcacgccattctcctgcctcagcctcccgagtaactgggactacaggcacccaccaccacacccggctaattttttgtatttttagtagagacggggtttcaccatgttagccaggatggtctcgatctcctgaccgtgtgatccacccgccttggcctcccgaagtgctgggattacaggcgtgagccaccacacctggccacttttaaatttttaaaaagaatagttgggccgggcacggtggctcacgcctgtaatcccagcactttgggaggatgaggcaggcggatcatctgaagtcaagagtttgaggccaacatggtaaaaccccgtctttactaaaaatacagaaattagccaggcgtggtggtgcacatctgtaatcccagctactcaggaggctgaggcaggagaattgcctgaatcctggaggcggaggttgcagtgaaccgagattgcaccactgcattccagtctgggcaacagagtgagactccatctcaaaaaaaaaagaatagtgattgcaaagagccatgtcacaacacgggcagattatttttcccatactgaatgaaaaagaatcaaggtgagagtgtatttagtgttttgttgttgttgttgtttttgagatggagtcttgctctgtcacccaggctggagtgcagtggcgcaatctcagctcactgcaacctccccgtcccgagttcacctgattctcatacctcagtctcctgagtagctgggattacagatgtgcaccgccacgcccgggtaacttttgtatttttagtagagatggagtttcaccatgttggccaggctggtctcgaactcctggcctcatgtgatccgcccacctcggcctcccaaagttctggaattatagtcatgagccaccgcgcccggcctaaagaagaatagtgattgcaaagaatgtgtcacaacacaggcagattatttttcctacgttgaatgaaaaagaatcagaaggtgagggtgtatacttagtttttgcacagctatattagactaaaactgtgaaacgagccaggcagacgaacaagtgagacaacaaaacccaccccgattcttgggaaaaaagcctggaaagacagatcccaaaatagtaaccatggttatctttgaatgggaggagtgacgttccccttctttctacttttctgtatttcccaaattttccataatgggtatgtatgcatttgttcactttatattaagcaaataatgcatgcctattgtgagaaaatcagaagaaaggaagaagcagctggtgatcccatcacttggggaatcgcctgcagcagttgctttgggctggactctgcagggctcctctacatccctgtgcttttgtgtttaggaatgcgcggtgctaggccgggcgcggtggctcatgcctgtaatcccagcactttgggaggccgaggcgggcggatcacgaggtcaggagattgagaccattctggctaacrtggagaaaccccgtctctactaaaaatacaaaaaaattagccgggcatggtggcgggcgcctgtagtcccagctactcgggaggctgaggcaggagaatggcgtgaatctgggaggcggcgcttgcagtgaggggagatcgcaccactgcactccagcctgggtgacagagcgagactccatctcaaaaacaaaaaacaaaacaaaacaaaaaaacaaaaaattagctgggcgtggtggctgtagtcccagctactcggaaggcccgctgtagtcccrgcgggcgcctgtagtccyagctactcgggaggctgaggcaggagaatgtcgtgaacccgggaggctgagcttgcagtgagctgagatcttgccactgcactccagcctgggtgacagagcgagactccatctcaaaaaaaaaaaaaaaaaaccrcggtgccaataaatggtgatacattggttgctttcacagtggggaatgaaagcaaaggcaaagaccgtttccagggggcatgtccygggtggggctctcggggctgggctggctgacctgggctgacaactgcctctgtctccacaggagcgctgtgtggccgccctggctcgtgtcgagcgcaccgacttcctgtctcccatgtgcatcggtgaggtggcgcatgtcagcgcggagatcacctacacctccaagcactctgtggaggtgcaggtcaacgtgatgtccgaaaacatcctcacaggtacttctgggagcgacagtgttgactggagcagtaagggccgtggctacacagctgcttccctcctgagggcagaggacgctccagggcctggccccttttccaccaatgagacctctctcacctcccaccatggccctgggagcagctatgtccattgccctgattttgcagacaggaaaggggcacagaggggttaggaaacgagttcagttacccagagcaggactcaaccctgctgtctgggtccggcctgagcacatcatgctgcctgtcctgctgcccgtggccagctcatccatggcaggggctgggcgcgggctgtgaggccggtacgcaccatccacccctctgcaggtctccctgccctgcttgccctcctcaagcgtagggaggtgttggctccagagaggacagtgcttgctcctgggagccccagaaaccaggctcagatggaagctcactgggtgaacctttgcctctgctttcatctgaatattctcctccttggccatggtaaccatggaaacccccttccccttcccactgggcgctgcaggagggggcggctccagtgttcaccagctcacgcttctttttatacccaggctggggacgggaggtgagggggaaggcgggcctcttcccctgcccctggtcctctccctgccacctcccaggtcaccagtcctcccatgcagagaggctgggccggtttcctcctcttccccatgcctgttcctcagcagtggctgccccgtggagtgccagctcacagccatttgaggggcttgagtcctcttcctcatgacgggccggtagcaagcacgattatgcatctagaacattctgaggacctcagcagggttgattagaatggctgtgtcagcccagctccggcaggtgggcagatggagctgagcaagggcctggggtggaaggtggtctgcgttcccattgcctgctgctccctcagcaggcacctctgacatcagagggaccctggatgctggtctcaggatgtggcccaggaaggggtgtatgggcacctcccacaacaggagcagcgcccacgactcgggagaggctcagggctgggtgggttccccactttaggggccttgggggttccctgccatctcctgtgagatcgcagctcttctccgactgtgctgggggtggagccttggccccttcctggagaggagggatggcctgccgcgctctcctgcttcctaggaccttcctgcttgtgagggcccagtcagcagtgccctttgtcattgcaggagttggtggcttcaaaaatgccaggaagggatctgctttgcagattttctgccatgaaagccccctttgtggtccatcagaggccatagcctcagaggaagccctgaagagcaggtttctttttttttttttttttttttttgagatggtgtctcactctgttgcccagtctggagtgcagtggtgtgatcttggctcatcgcaacctctgcctcccaggttcgagctattctcctgcctcccaggttcaagctattctcctgcttcagcctcctgagtagctgggattacaggcatgagccaccatacctggctaatttttgtatttttagtaaagacagggtttcgccatgatggccagggtggtctgaaactcctgacctcaggtgatccagctgcctcggcctcccaaagtgctgggattacaggcatgagccaccgagcccagccgagcagtttgggatgatggggagagaggcagggagacagaaaggcgttctcaggctttcagcatggctgggacccgctgtccccacagcagagagtgatgcaggccaaaggtcaggggtactgagcttgaggaactccctagatcctgaacttccctttcctggccgcttctgctggcccataatagatatggaaccgatagtggatgagcaaatgaatgaatgaataagtgaatgagcagaggcgaccaggaagaactgggcatcagtgctgagacatgctggctgatggggttttgatgaggacgacacaatctgacatattcgtgaggatccctcgctctttaggggctgagagggggagaggctcctgtgcagagcyaaggcaggcgtgagcatgagagagcagcccccaccagctcacccagaaggtgctgggagcttctcggcctcccagctgtgtcctggccaccacagccctcggccttctcctcctcctccgaaggatgggctcagagagggacagagatgcccacccctcctccctggggacatcagggctggcattgcgctgtcgtgcgcgtgaggcttggagaaggcaggatacgcttgccagcacatgaaggcttttcccagtggggctgggcggtgccccaggttcttcytcccagcttcagccttttccctgtagcaggggctgggcagggaggccttggagccccaaggctgtagcttttctccatatcttggtcaggccccggagcccgctgttgtctcactctgtgactgcgagtctcatctccccctctgtctcgctcatctcctcgtctgtgcttctgcttctctgccatctctctctgcagtctctattgttctcttgaggcccttctctgtctctgcccatgtgtcccctggaaattgaactcgaaggccccaacagcaagaacagtgcctggcacactgtgggcacacggggagcactggctgaatgggtggtgacctctgaaagataggggtattgcaggtgggggcagaggatgcgcgcggggaccctggcccggagcaggctgagtcataagctgtgtgcgtgacatctgtgtgctgtctccaccccaggagacaggggtcccctgttctgtgtgtcccctttacctgggctgtgctgcctgtcacgaggccgctgagcgagcacaggcccaggcagacgacccgcaaaccttgcctttgaggcagctcatttatctccagcaactgtcaaaatattaagctaactgggatgtgattgctgtgaattgctccagaaaaatagctgggagctcttaagattttaagagatttttttttttttttttttttttttgagaccgagtcttgctctgtcgtgcaggctagagtgcagtggcgcaatctcggctcactacaacctccgcctctcaggttcaagtgattctcctgcctcagcctcccgagtagctgggattacaggcacgtgtcaccatgcctggctaatttttttgtatttttagtagagacctgttagccagcatggtctcgattctgagctcgtgatccgcctgcctcggcctgccagagtgctgggattacaggcgtaagccaccgcagctggccgagagataattttctaatactgccgttgtcttttgatgctttcattaaatgatggagaaaatacaattagcatgtttgcctcatttgctccatggtgttcatttaggtccagagggccactcgagttgtcatggaaaccggcttgtcaggctggctctagctgaatccaacaggaaatctttattcccaaaagcaggttgtcagattcactctcagtcaaagtgcggtggaaatattttcccatattatttgcctgtggttcccaagcactgggagccccacgttcccaaggtgtgttctgtgcggggaggaggggcaggcacaggccttttcttaatgggccccctggggcttgatttggagcctggggctgtgtttattgaggaggaaaagcgctttgccttggggaggcaggttcaggtaactggtgggaagtgagctcctctgggggttttgggcagggccctggggctgctcctgtctccctttcctccattacttcctgcagtttgctcttctgctttatagtgaggatcttccacattgaagaagccacttttatttatttttttaagacagggcctcgctctgtcgcccaggctggagtgcagtggtgcaatctaggctcactgtaatctctgccttccgggctcaagcgatcctcctatctcagcctttggraccacatgtgtgcaccgccatgcccagctaattttttttttttttttttttttttgagrcagagttttgctctcgttgcccagcctagagtgcaatggcgccatctcggctcaccgcaacctctgcctcctgggttcaagctgttctcctgcctcagcctcccgagtagctgggattacaggcaccaccacgcccggctaatttttgtatttttagtagagacggggtttctccatgttggtcaggctggcctcaaactcctgacctcaggtgatccgcctgcctcggcctcccaaagtgctgggattacaggtgtgagccaccgtgcccagccaacccagctaattttttgtatttttggtagagacggggtttcgccatgttacccaggctggtctggaactcctgagctcaagtgatccacccacctcagcctcccagagtgctgggattacaggtgtgagccaccgtgcctgacaaagccactttttaaaggcatccttgcagatacttctctgaaatgactgggacatgggagtatggcaccaagttgctgtgtgaccctgggtaaacccctagacgtctctgggcctcagactccttctgtacaagtgaggggtgtacaccagggatctctaggctcctttagccccagcaggccacgagcctctgtttctcagcacggacagccttccctgtcctgcagccccactttgctctgtgggtgggctcagtgccccaaggagtcagcagcctatagcccgtctcttggcacctggaagcttctggtggagctttggatgggctggcagcacacccgagtgtctggtgtgaaggaaaggaagttcctggggtggcaaaaatggagcttgatgagctggctccgctgctctgtgctttgggctgtgggggccctggccgtcccccctgcccctcccctgggctgctctgcctgggcacagcctccacatcctcctgagcctctgcagcctgcacgtctgtatgggccaagtgtctttctgggcttccccgtttggcgggagttcttggcagtgcttagacaggtggatgggatctgcagaagacgttgcgtgtctgagcatcaggacgtcaagttccccagcaaggcacttttgattttgacgttcgatgtcagcagcgatcagttgctggagacttgagccagcaggtgaagcgggctcagcctcgtgtccccgggcagaacgaagggcgtctgcctgcagccaatcagtccttcccctctgtctgggaggctcgttgggagcctctgatgtgttttcataatcaagctccctttctgtcaaaacaccaggaagaggaggttgcctgcagttggtgccctccagggtgatccctgttgggtgttgtggctgaccagctccggaccatccaggcttaaaccacgtggtctgaagtcttctcagcagcccctggaaagggagaactgccccagagtgggtgcgttgggaggggctggggtcctgagctcaagccagttttgggggggcatgccttgtgatgggggtgggccccacgcagcctctctccatgggctctggggtctcttgttctgtttgtccacactcacatgatggcagcactccccagccaggatgctgaaaaggccttgggggcttgggggcttgggggttgggggccagagaggtggtgcacactgtggtgtgtttcaggtactgggaccgggcgctggagcagcacctgccacgtgcctggacgctcacattcccaccccgtctcccgggcgtcacttaatgtgattttcttctcttaaggtgccaaaaagctgaccaataaggccaccctgtggtatgtgcccctgtcgctgaagaatgtggacaaggtcctcgaggtgcctcctgttgtggtaaggtgccctttctacttctctcttgggggcagatggcagagatcaggtcacctcacctgatgttgggaggctcgttcagctaagggtcycaagggagcaacaggccagagctagggcacagggggccaggtccgccagcaggcagtgtcccctctgggctgggcagggcatccctggctccacaggagtttctgtcctgcctccgaggaaacacgggtggggaggagacatgtctgtgtgggatcttctaatgtatgtttaattcatgctgggaatgtgagcgcaagctggccyagaacccgtggacataaacatccctccaacctagggacctttttgtcacactccctaaccagagaaaagacggtgacaggatcgtgatagtgacatgtcctttcgggagccaggaccaccaggctgcgggggccgggccagctgttcccccgtggcccctgcaagctggttctgatctctgcttctgacgcagtggctgtggaaacagttgtcatatgagcttttgtctttctcccttcttgtcccctgctggggtctgtctccttctctgtgtttctctcatttctggcttcgctgtggttggaagcatctttctttctttctttctttttgttttttttgtttttttttgtttttttgagacggaatcttgctctgttgcccaggctggagtgcagtggcgcgatctcggctcactgcaagctccgcctcccacgttcacgccattctcctgcctcakcctcctgagtagctgggactacaggcgcccgccaccacacccagctaattattttatatatattttttagtagagacgggatttctccatgttagccaggatggtcttgatctcctgacctcatgatccacccacctcggcctcccaaagtgctgggattacaggtgtgaaccactgcgcccggcagaagcacctttcataataccagttcattatgttgtcagaggggtcctgccatgggcgggcctgtgggcgaagcctgtggaagccacacatacagactcctggaggggagacgttgggaataaagaaatttaattcgttgcctaaaagtactccctcgcctccttctcctgtgccccaagttcattggcaagtccaaggacagatgtgaccagctcctcccgcagcctgaccctgcggtccacaggccacagcccccaggaagagctcttcttagagggaaggaaccaggattctgagtctctgcagtgtgggccccggcagggagcttttcctcyggctgagatatatatatagaatacatttttagaaataataaaactgagaaccagattgtcaggaattggtgcctgctctttttgcttccagacccaatagagacgctgggtgctcttgccgctgccggcagccytggttccctccccagcgtttgccgggtgcaggccacttcccgcctgtaggaggcctggctctccatcttcccgtggccccccggtcaccagggctgatggggcctcggtccctgctgccactgcccatgtgagactggggaggtgctccttgagacctgcttcctgccgtctcttctgtccccagctccgtgtctgaccaggcaccctgccagggtctcctcagagggcagtgaaggtctgggtggggtgtctccccaggtgggtgtggctggctgccgggtccagctgctgtttggcctaggttttgtttttttttaatcttggtgacaggggagccctgtccatatttaatgggaagggcaggctggtggctgcacctttggttttatgagagcaggatggcagcatgccagaatctggccagtgggcgggggctcagggtcggggtgtggagtccgaggtctcatattcccacctgacagtgtcccggggctgctgtgacaaagtgccactgactgggtagctctcaaacaatagaagttgattctgtcacagttctggaggccagaagtgcaaaggtatgggcaaggccccgcgccctccattggccccaggcgaggatccctcctggcgtctccagcgccgggtggctccaggcgtcccttggctgaggctgcgtcactgaagcttctgcctccatcttcgcacggcctgcttaccggagtacgggtcactgggctcagggcccgtcccattctgctgtgacctcattctaactgtttacaactacaaagacctggtttttggagcrtttgcattttgaggtttcaggtggatatacattttgagggatgctgttcaacccactgcaccagccctcggttcaacamcctctcccgtctcttgttcttgtggggctgttctctccctgcttcttggctgagatggaagttgtggtcattttcagcagtgctaacttgggggtgattgaagacctaaggagcaggggtcagatgggggctcctggctgttctccgcagaattgcaagcrcacccaccccacgttcattcttttctctaagcccttggcgttcagtgagccacatcacatgtaaatattgagacatagcatttaacggatttaattttcagatgctacccagttctgaaatctctcccaggccccatgcctggcttcagcatctgatggtgcatctcaggcgggtgataccgaggggcgggcctggacctgaacacagtcacttttgctgccttgtcgcttaggatcgatgcgccaagagctgttgggtttttggccagtggaggggacgggtagcttctgactcccctggctcccatcccctcgctgcagggacagggtgctttcagcgtggcccctgttagcctcgcctctccttgcccagtaattagctccctccctcccacatcctggaggagctcccagttgctttttcatttcctttgtagagtgggtttgatgagacataaataccaacttggccttgtcgaggagttgttgaaaccattccatggctccgaggcagccggagccgcagatgggagaggctgcacggttctcagctgcagctgttgttcagagctctttgcaccatcttccccccaacacacgctaggcccacgtagtataaacctcccactgatttggaatctaggtctcctgtttttcactggtgggcccggccagaggcctgcttaggaatcccagaaagtacagcttccttccctggctccgatgggcatttatgcccatctgctggtggcctggccacagggctgtcttatattgcatgagcatgctcccgctgacctttctacagacagccatccccgatttaggaaaatgtacgtccctgtatgtatagatatacagatatatattatatatacacatacaaatagagatgtcacatacgtatgcatgtagatatcttgaacacgcacacacacacacacaccacacacacacactggtttcctggatgtgtgcgtctccctggaggaacccagctgccggccatgcgcacagtcgtctagcgcaggatgtcttttctttgctccaccttcctccccagcctgcctgcagctttcccagtgagcagggaacctcggtgggcctgtgatgggcccgaggggccccaggatgaccagaggggcagccgcagccctggacaggctgagtggctgtcgggggtggatgctttggtttttttcaaatgtctgaatatgtgctctagcgaagaggttcacagcctgtctctcagatatttgggccacgctgtctgctgcttcagatcagttgggtttgatgagctctcgggggtgagagttaggtgccagccatcattaaaatgttccagcggttttgttcccagatggaaaggcagcattggggaggaggctgggcttctcctcatggcttgtgtccaggactgggccccatcatttccctgtgcgcctgccaagcccagacaaatgtactggataccatgaggatttattagaccgggggctggctcctttaaaaaaaaaaatccctttaaaaggcatctcttgaggatgctgaagttcacccaccaatgttcctaggtagatacacagcacagactctcttctcacagtcgttacttggccggtggaacattaggacgtggtttatttatggaggaaaaggttgaattatccactgcaacttaaaacactccccacagtttgcttcttttgaacaaacgcttcagctcccttctcagcctcttttgaagatgggttctcaactgaagatgatgggtagttacgccgaggaacggtgaatggtgctgagaccctgcacaattttggagctgagccatgagcaggaattatcgagatgtttaaaactggcttttgaaagaaggcctaacacagccgtctgaagtgaacttgcttaggtcagaggggcttcaacaggcggccgaggggcccagaggggccctgagttccgtggcttccccacaagctcagctggaatggttggttgagtgaatgtgagagcagaagtggaggctaatcagaacagccaggtggtagtcggcccctggccaggccaagggggagggagaaggtcgtgggggatggagcaggcagagggtctggaaccagcctgcggccagcacacaggccccgagggcccctccgagggtcccatccgagtgtggtgcatcccctccagtgtgcacagcagggcagtgagtgaaccgtctgttacgtccaagaaatgcagtatccccctgctgtgtcccgggactcaggagctttggcttttgtgctgagttgttggtgttttttatttatttatttatttttttagacggagtctcrctctgtcgcccaggctggagtgcagtggcgcaatctcggctcactgcaacctccatctcccggattcaagcgattcccttgcctcagcctcccgagtggctaagactacaggtgcccaccaccacccctggctaattttggtatttttagtagaggcggggtttcaccatgttggccaggggtttcaccatgttggccaggctagtctcgaactcctgacctcaagtgatccacccgcctcagcctcccaaattgctgggattacaggcacgagccaccatgcccggcctgtgctgagtcttatagtcacatttatttttaacttctggagtcaaaacccctgtgattcatttggagagccgtgggaggacagttccatcttttactgcccattctctaccaatatataacctgtttgattggccaagggtcagcagggacacacagggttcctgctctgtcatggactttggagagtgggtggggcctttttgaggatccctttattctgtaatgaatcctaggaagcaatgggacagtgcaaaatgattttaagtaacctaggatcagtatggttttaatagtgaaaaagcgggggccgggcacggtggctcacgcctgtaatcccagcactttgggaggctgaggcgggcagatcgcaaggtcaagagatcaagatgagcctggccaacatcgtgaaaccccatctctactaaaaatacaaaaattagccgggcatggtggcgggcacctgtcgtcccaggtaccggggaggctgaggcaggagaatcacttgaacccgggaggcagaggttgcagtgagctgagatcacgccactgcacttcagcctgggacagagcgagactccatctcaaaaacaaagaaaagaaaagtaaagaaaaattgggaacaagctaagtgcccacatagttacaaaaattacgttaaatagatacacggttgcttttaagctccacatacagcaccatagagctttttatatatttgtaggcattaaagcaattccaggaaggatctaaaccaaacacttgacccaggttgtctctctggggagtggagccacatgggatttcactgtttctgtattcttattacttatattaaaacacacatgaacagaagaaaaaatagtcycagttacacaaggctataagggcctgggatcatggccgcccagcgaggggaggaggccgtgtcctgcctgggcctgacctgtctttggtttctcgcagtattcccggcaggagcaggaggaggagggccggaagcggtatgaagcccagaagctggagcgcatggagaccaagtggaggaacggggacatcgtccagccagtcctcaacccaggtaagagccgcggacaccagcagcaggtgccrctcctcaccggggacgcataggaggcaggagcaggccgggcctacgtgagcctcatgcttgaggttccccaggtgctgagcatgctctccgggaaccagtttctctggggtccccagggagggctgtcccccagccccgccctgagccatgtagacccctccagtcacacacctggaaggcgacctgcgtgactcagggagtcccagagggcactgtgcgtggggcctccattgccaggcaggtggtgtgcacctgttcacaaggaatttgtttttgttgtatcttttccttgtgttcgctcagtggcttgttcttttcttttttttttttttttgagttggagtcttgctatgtcacacaagctggagtgcactggcacaatcttggctcactgcagcctctgcctcctgggttcaagtgattctcctgcctcagcctcccgagtagctggtattacaattacaggcatgtgccaccatgcccggctaatttttgtatttttagtagagatggggtttcaccatattggccaggctggtctctaactcctgacctcaagtgatgagcctgccttggcctcccaaagtgctgagattacatgtgtgaaccaccacacctggccaagtggcttgttcttgatgggatttccaactcatccaaaaaagaaaaaaacggcagcagctgttcaagcgccacttcttcccggccccactgttcagacattgattggaggaggggctctgccagtaggcactgggctctgtggcatgcccagtttccctgtggtgttggtcccttctgccatccatcctcttgctctcatgtcagggtgctctggctttaacaaaatgttcactcaaaatctaaacgaaggcacgatgagatgttttgcctcaagcaaggactttctacccagagaactccccgcgttcctagaaacaattcagggcagggggccctggggagcatctgtccccctaggaaaagggtgagccctcgggggcaggcaacgagcattacccctctccctactgcacacatggtggtcatgttgtcgtagtggcaggagaactccctccaggacgcactgtgtgcttctctgcctccctgcgatggcctgggctcgtggcacattcgtgctctgtgctgggttccacagggtacctcatgcgggatggcagcctgaggagggtttgctgccccccaccatgccttgggagaccctggtcatggtgggtgtttgagtttcttactcagctttctctgttttgcctccaccctcagcagtggtggaggacctgcctcaagtaatccctttcccccttggatgtgcctgtgatgtgggctccactctggggtccacctgctcctagccctgccgagaggcgccctggcccctgctaacctggactcggggcattgttatggccgctcacctcccttgcttagtccacataagcaccaaaggggactggtgaaaacccagtgggcgcacagatgagagcatggctttctgggcttggctgctggcatgcagcaggagtgtgcttgttttctgggcgggtcaacttgaggcttgaacaggagtttgtgtgtatttggtctcacatgtgtgtctctgactcagtctgtgctccagcctcaacttgccaaaagcggactggttgtcaccttaggccagtgggactgggtaggtcggtttctttactgttggggaaaccactgtaggtttcctctcttttcatgtctgctttttaacaaacaccaaaaaaagaaagaaagaaaattaatgtgtcagtattaatagaaagaatggtgctgctttgatgaaaccccagtaaagagatatctttttttttttttaatttgaggcagaatctcgctctatcctcctggctggagtgcagtggcgcgatctcagctcactgcaagctctgcctcccgggttcacgccattctcctgcctcagcctccccagtagctgggactacaggcgcccgycaccatgccccacttattttttgtatttttagtagagatggggtttcaccgtattagccaggatggtctcgatctcctgacctcgtgatccgcccacctcggcctcccaaagagctgggattacagacgtgagccacygcgcccggctgagatatcttttaaaaataaaatttaaacagccagtttatcaacacagcaatacaccagacaggcctggaggcacgtgctggggcaggcagtgcccaggccgtgcttttgggagggcagcccagcagtcaggtcagacaccggcystaaggaatgggatgggatgggagcaacgggasgtgtcttaggaaaggcaccaacacagcgctcagggccagacaatatgtccacattcaaatccctagagcctgtgaatgggaccttatatggaaaatgggtctttgcagatgtggttaaattaaggatcttgagatcatctgggttatgcaggtgggccccaaatccagtgatcagtgcccttgcaagagacaagaagaggctatgtctagcctaacacaaaggggtcctggaggagagggttggatggaacatgggggctgcctggacctacctttttgtgagcggtttctggagagagcttggggtaggtgccagaccccggggggtgtgggcagcactgctgggctgactctggctttgagaagcatggattagatcctagcttctgcctttaactgatcctcagggacactaaaattactcaaggttttcaatcagtttaaattcctttactcgtgggattctcttctgtttgccagcctccgattgactgtaaatctacacgtgatatttttcagaatgtgttattcactgtcagtcagagttggcctcctgaatctcgatttcctgattgtatgtgcttttatttttacttttttgttttataaaaatgtatcttcctcagatgattggattagagactcggcttttaaatatttcttaggaagtcccatgtccattctttcttgagcatttctgaacatctgcatctttgactccagtttcctggtagagccggtatctcagtggcatggcttcccggtaccctcgggagcccaggggtgggctcatctgagaccagcctggtctcctgtatggtggcttagcctgagttgggtttggcaggggcgtccgggtcaatggggaacagcagctctgggagaagagtgtgcgtatgtgcttggcactggggtctttctaacaggtgtgacacgtgctatcccatcccgtgggaggaccctccgtctctgccctggagaggccatcttggcctttgacttgcctgctcccagcccctgtccatcccacatcccagacctcatcctagagcaagagttcagactgttgcctagcaacctccacaggggtggcctcgtctttcaggtacctcagagtctgagagttccttaaaagtcctttgtccaatatatacagctataatttgtctatatatatatatatatatatatatatatatattttttttttttttttttttttgagacaagtctcactctgttgaccaggctggagtgcaatggtgcgatctcggctcactgcaacctccacctcctgggttcaagcgattctggtgyctcagcctcctgagtagctgggattacaggcatgtgccaccacacccagctaatttttgtattttttgtagagacagggtttcgccatgttggccaagctggtctcgaactcctgacctcaggcgatccgcccgcctcagcctcccaaagtgttgggattacaggcgtgagccaccatacctggccagaaggcagacctggtcagggactagacctcatctgttccctgcccaggacagctggcactcagaaagggtagctcattcctaactgacaagccccaagctgttgaacacgccagcccactgggccacgaaatgactgggactcatttcaggtgaagacaggtcctttctaggtctggccttaggcaagtaatgtttctcagtagccgaaaaagctggtgggatgaagggtggtcctgacccagaagttgatacctgaggtctcctaagtgtccgatttcattgctttgtttttcttttttttttgagacggcgttttgctcttgttgcccaggttggagtgcaacagcatgatctcagctcactgcaaacttcgcctccctggttcaagtgattctcctgccttagcctcccaagtagctgagattacaggcacccgccaccatgcctggctaatttttgtatttttaatagagaggggtttcaccatgttggccaggttggtctcgaactcctgacctcaggtgatccacctgcctcagcctcccaaagtgctaggattacaggcatgagccactgcgcccggccccagtgtcatttccgaggctttgatgtgcctctgggtcatggttgctaaattgtgtcaccacaaatcatatgttgaggtcctgaccctgagtccctcagaatgtcactgaatgtaaagaaagagtctttaaagaggtaattaagttaaaaygaggtcattagggtgggctggtgtctttacaagaagaggaggttaggacagacacacacagaggaacaaccctgtgaggacacgggggaaggcggcatctacaagcccagcagagaggcctcaggaagagccagctgctgataccttgacctgggacttccagcctccagggctgtgagacgaatttctgcygcttaaggcgccagcctttggtgggcactcttgttacagcggccccagcacacgggtacactccacacacagaatttcaaaccgcctcccctcccttctctcctggtcactgttagctgccatgtgagtttcctcattcctgccctgggcttgccctcatgccagggtgtgtgggagaagtagcatgtcatggagtcagaagcagagtagaggagctcctcccaaaaagccacattctgggggcctccccacccagcccaccctcctgaatatgcgtcaagaggtccttgcatctgggcccctctgggagctggcgtgcagggtcgcgatctcaaagccaaccaacagacccctccaagygccaaggcttttgggaaggagcccctgggggccccgacatcctgcattgcagccagttcgcacgacctgtggcttggcccaagggaggggatgcctgctctcccacctgctgcttcagcgtgggcctgccagggtctaggggtgtccagaatcagcctgcaattgccgagggcaccttgggcctcaggggaatttagtacaccctgaaacccacaataccacraggagtggggctctgagagaaggccagaaattggcggcatgaaaagattggaaaagcctattgtttattgacctgggaacggaaggagactgaaatcaaaagcccattaagactcagccttggctgggcccggtggcttacgcctgtcatcccagcactttgggaggctgaggtgggtggatcacgaggtcaggagattcagaccacggtgaaaccccgtctctactaaaaatacaaaaaattagccgggcgcagtggcgggcgcctgtagtcacagctactcaggaggctgaggcaggagaatggcgtgaacccgggacgcagagcttgcagtgagccgagatcacatcactgcactccatcctgggtgacagagcgagactccgtctcaaaaaagaaaaagactcagccttgtgtcaaaaatcagattaaagtgtggtttacacacccacatgtgtcttgagagagtgagaaagggagtggagtggagtgggatggaaaagtaaaaaaaatacaccaggcttgagcgtgacacttggaaagaacgttgggtgtggttcctgtcacatggaactgactggaggcagacagatcagatgcctactaagtttacgaggaaactgaatttgcctggactgaaaaaaagcttttgactgttcaaactttaaagtaacctccccaaacctagacaagcaggaggtgggccgtgggcccctatttcccagtgcccgcttggatgaggccatggtggataaccaacagggaagaaccttccaggaggctgagcaaaggaccatgtagttcctccccaagagtggaatcagagtctaactaaagacccttccccatggccatagctcagaccctggcgggagtcatctctgcttgggccaggggctcctgggtagctcctgtgttctttcctttcctgaatgagtgtgctcttctgttccctcttccgctgctgtataaagggtgcaagtgtaggtaactcatcttcttagttcattggctgcaggaacatgaagaattgcgtgtaaacacgatggagaagactgcatgcatgtgaccagctgctgcgctctgaggtcagcgcagaggccggatagggtttcaggtggtcgtccttgagggtgaggtgctccacgtgtgcaaagaatacaacagggatctggtgactggaggggtagaaccagacagagatgaccaagcctgtctccacacatagcagggccacactgccctgcctgccctgcagcgggtgtgaaaataccatgtctagagtgtgagcagagtgaaatgctgcttccaggcctgacccatcaaaacctcaggtgtgtgagcctcccccgactctgtccctttccaaggtaaccttcaaagctacccattaaaagtaatggagctacgggaccaaaggggcctgaatccccgcatctccaacatttggaggaaatctaccccactaggaaagcctgatttggactttacctagcaggaaatcaacctcactgtgtgacccactagggtttcagggtttatctgctgcagcagtgactatgatcttgactgacacagtgcctaatctgtgaacctgcagtttcaaaatgatgtgaggagcctgaaccaggcccccaggatagcagtgggcgaggtttacacagccataaacacaaaactctccttttcggatccygtcctatgtgacaagctatttacagggcttcgtgtgtgctaggtgtttacatcatcttcataacccgatagttttgctttcaccatctctggttccagctgaggaaactgaggcaaagggaggttaagttcccatgaaggcagcagagctgggattcaaacccaggcagtccaactccagaacctcccttcctcccctatcctctcttgcttcccccatgccctcagcctccaaactactgcttacgggagcaggactatgggcctggccagagggccagagacatcragtgggaggcgtttcagacccagggccaagcccctggcctgrccatgttcaccagccctcgcaccctcgtggatggctcagggcggatcttcctggggcttggccagagcactgcctgaccccagaaaggcggatcccaacccaggagccggggctaggtgacctgccaggaccccatctgctctggaagggctggaccaggcttggaagtgaacactgttttcaacgcaagcgccagggatgaggcaggcacttgaacttgtctgaggcagggctaattttgtcataaaccctaaaaatggacagccatgtggccacatagtccctacatggtcaaagctggacagctgacagctatgaatccgaagagctcatggtaattccattttcttttgtcagacagagaaaacaataaggataactgacttttcaaaaattatatattgggctgggcaaggtggttcacgcctgtaatcctaacactttgggaggctgaggcgggtggatcacttgaggtcaggagttcaagaccagcctggccaatatggtgaaaccctgtctctactaaaaacacaaaaattagccaggtgtgctggcagatgcctgtaatcccagctacttgggaggctgaggcacaagaattgcttggacccaggaggcggaggctacagtgagctgagattgtgccactgcacttcagcctgggcaatagagcgaggctttgtctcaagaaaaaaagaaaggtctaccttctagagactggacgttatatgtcatcggctttttttcttaagtgcggcctcttaaagatatttcaggagcagtgcagtgttgggtgactgaagctcctccaagatatttggggctcttgcaagagtgaggtgatagagcagtgaatggggttgggggctggccagagggaacagcttgctccctgtggagctgtacattctcaggctgtggagtaaattacagaaacactgtggcacttcttgtaaaattggaaatgcaagtcagatggttaactagagcctggtggagggtcacacgcagccccgggactcacagctttgaggtgtttcatggctacccctgggcagggccttgcagggcactgatggccccagagagtctcgtcatggcccactaacagaatgggtcatgaatccttgaaaacctctccttcaccaactgtagcctgtttggagaccatagttttccttagagaaatcatagctgaacccggctttggacgccttcgttgactgtgtagacctgagggtggtttcggcattgccagaccattcagctgtgggaatcagcctaccccataactaatctctctcttttgcaattccagagccgaacactgtcagctacagccagtccagcttgatccacctggtggggccttcagactgcaccctgcacggctttgtgcacggaggtaagaaggaagcgccctggccactccattcctgtcccttggctcattgttgcttctctggcagccgtgctgctgtctgacacacttgaggctcttgtgtttggtgaagtacaaacttccaagaagttgtacaataggccaggtgcagtggcacatgcctgtaatcccagcactttgggagatggaggcgggaggattgcctgagcttaggagttcaagaccagcctgggcgacatagggagacccctgtctctacaaaaaaataaataataagccgggcatggtggcctgcacctgtgatcccagctactgggaggctgaggtgggaggatcgcttgagcccaggaggtcgaagttgcagtgagccatgatcrtgccactgcacttcagcctgggcaacagaacgagaccctatctcaaaagaaaaggttgaacaataaatcacagaaatatgctggcaggctgggcgccataggtcacgcctgtaatcccagcactttgggaggccgaggtggctggatcacctgaggtcaggagttcaagaccggcctggccaacatggcaaaaccccatctttactagaaatacaaaaattagccaggtgtggtggcaggygcctgtagtcccagctactcgggaggctgaggcaagagaatcacttgaacctgggaggcggaggttgcagtgagctgagatcgtgccactgcactccagcctgggcgacagagtgagactccgtctcaagaaaaaaaaaaaaaaaaaagaaagactctggcacccatttttcaaattggtgataaaaattaaayrgatgactgcgtccctggggaggctcacatgcagccccgggatctgatagctgtgagatgtttaatgcctgctgagggtcagggcagggccttgcagggcaccgatggccccaaagactagcatcgtgactcaccggcagtgactcgttaataatgtttttcctctaatgtttgcatttattttttcccagtaagtacagatctcttctcaaacaacacaggccttaaagttcgtagcttggcttcccagagtttgggaaacagctggaacgcaagaggatttagctctaggttcacagatggacactttttactttaataatgtgtaattatttttcatgatttaaagaaaatgtagatagcatatcaaacctgtaatttcatggctactgtaattttgaagaagaccaaagtaagcttttaaaaacaagttggttgaagaaaaacgtcaaggagataagatcatagtgaagtggtatcagtgagagcagaagttgtgaaggtgctgtgtggttaatgaaggctgggtgcagctgttcttggtgtactgagctattcatctgtcccaggcataacaggcacttttgcacaatgctgtcatttctaactgcctggaacaccaagttctgttttcttctccactcagaaaactcctatttatccttcaaaacccagctcaaacgacaccactctgtgctggcttacatttatatttctaccagggacacctcaggagcagggattggatcatattctttgtgttggctccagcacccacagagagtcaaaggggcaccttgcagatacttactccatgagtgagaggcaccaatcactttcaggtttgggacattggctctgggcctatgagatggagtctcactctgttgcccaggctagagtgcagtggcatgatctgatcttgtctcactgtatcctccgcctcctgggttcaagagattctcccgcttcagcttcccaagtagctgggattacaggcacgtgccaccacactcggctaatttttgcattttaagtagagatggggttttactatgttggccaggctggtctcaaactcctgacctcaagtgatctgcccaccttggcctcccaaagtgctgggatcacaggcgtgagccaccgcgcccggccctgatgtgagatatgtttccaaagtttgtttctttttctttttcctacttcatgattgttttcgtcttcccactcagtggtggctgcactgctcgtaaatctgattaactatggtcttgccaagggaagctgtgctttataacagcacttccaggcccacgagcactatgacaatctgagtgtcttgctgcccgcagaacagctgttgcctcagaggcattccctgtttccccttccttactgcccccatgtctctgtcctccctcgaattccagggtgggctcagctccctcttccgagcctggccatcccaagcccaggcttctgccacttccgagtattgtgtttgagactcatacagctccrttctgcctggaatttgtgaaactctgggctatgagttctgcttactttgtcgacatgttagacgttcttcactaaatggggcatttccgtcgtcgctgtctacgtgctgaaaagtccacacccttaagcccagtctttctttctttatgtgctgaaaggcatcagtgagatgccaggagtgggagaagtcactggagaagccccttggaagtccgcagcatgtcatgttcatttacggtgtctaagctgcttcactgatacaggcacatgttaagatgtgtattaggaataatggctttacaataatgcctattttagtagggattttctgcccacaatttgtaaaaaaatctaataattttaccaagcttaaccttctctcttttttttttttttttttttttttttagacagagtctcactctgtcgcccacccaggctggagtgtagtggcgtgatctcggctcactgcaagctctgcctcccgggttcacaccattctcctgcctcagcctcccaagtagctgggactacaggtgcccgccaccacgcccagataattttttgtatttttagtagagacgggttttcagcatgttagccaggatggtctcgatctcctgaccccgtgatctgcccgcctcggcctcccaaagtgctgggattacaggcatgagccaccgtgcccagccttaaccttctcttatagggcctggtaactcaccacgagtgaatgaataaaataaacaccacattgaaaacacgaactgtgattttatcgtattttcctgtaaagtactgttggcaagaatggcatctaaaatcatttgaatcaaaatcttcactaaactgtaattcactagatgccagttgcagaagaaaatggtgaagtggatgccaatttagcctttattctgtaattctagactgcgcaaagctgcgcccgagtcccgttttctgtgagttccacacactggctagccttggtcttgaggactttccacacaggtctgggtggtgataaactcatgaagggtgtcttggaaagggaggagctcttctgcctggaatcacagggagaacgcagtgctcccaccagacactagctcactgctgctttcctggttgcatggacagaacctcctgtctttagttaggggaatagwagagatctggggagtgagcccgagggtgtggagggtcattgtccygtgcgggaggagggttgatgatggtgtgtgtgcagttgtgggttgaagggctcgtggagggtgtggaggaccgtcatcgtcccatgagggaggagggttggcggggtctctgccgttctgggttgaatggctcgtggagggtgtggaggaccgtcatcatcccatgcgggaggagggttggtggtgtgcgtgcagttctgggttgaagggcatgtgaagagggcaaactgggcttttggtttctgtcttcccttgagtcctgagtgagtcactccatggtcccccaccctcctgcatagagtgctcaggatcggcccagaaaagaccagttaccccctgttctcccctccactacccccacgtttgcttgtacagactgaaggggtgacctagcagatacctgtgggggtccagaccttgggagagggaagttcttgggggtcagccggtagccctgttcaaggcagaccttagaggagtcttgagcatgcattcttcacttctcaacttttggccatcttagytttttccttgtactttattttttatttttaaattaattattttatacttaagtattatgtggaaacaatccagagggcttgtgggtctctcttcctcccatcgctcctgcaggggtagctcctgtttctgattcaggactctgcttcctaagcatgaggctctgttgctgtcccttgatgcgtaagtttcagatgcatgagccccatcactgttcatcaggtggggtactgtgattactttccctcgaaacggtgttactacgaaagccaatggttgttctgtgccctccagcagctctgtaagatgctctcagtacagtctgcctgccacggaactgttccctgccatgttccctagaggggtccgccttcagtcctcctccacgttgctcattctgtgcctgctctaaactgctctcctgggacggcctttgcactcgcctgggttggatgccaggattcatggatcttcaatttttctctttgctggttttggtggaacatgtcctccagtggctccccaagaaaggcaatatattaactggaataaaggctcagctgccacccagacagcttggcttcaacaagagagaggactttttcttttttttttttgaactaacaatgcagctgtgagcgatccacagccgataggcagccccgtggtgctggrgacccaggcttctgctgccctgtggctccgccagcctgggagtgccctcttggtgagccacatgttgcctatctcttcatcagcgtccagccccaaaggggtggagggcatattgraaattgcagcctccccttttggccacaatgtcctcatgtggccacatctgtgggtgggtgagtgccgctggtcagacgtgtctgttagacattggagtgactgatgaaggaagagatagtctctgtcatggggcctagagggtcatcttcccaagctttgcgcgtctgaaaagacttgtggctgagcagggtgtggggaagtgttccttacagggcttggaagygtttgttccatgtcttctggcttctgaggtttttgctgggaaattcagggactgtagattttccctccactttctggccgcaacctctgcctgtctgctggcctgatcttccctccccattccagccttcagcccttggcctatccttgatcttccagggactttttattactaacccatttatctggatagcaaatcacgtagtttgcagtttctgggtgtttcttccaagtgaagtgacatccttctccacccctgtcccccagacaccaccagcttagcagccgcaggcgattatgctgtgcactcacattgagagccatggttctggctcactggggtcaccccaggtgtttggtaggtaggaaggggcccaagaacttgcactgcccccttgctccttgcgatgctgaggctactggtctggagtccccactgggccgtgtcatgtctctctcaatctctgcgctctaggccacccttcccaggcagttttggcaggtgggctcacctcatgtaattaaaaagttttaatttcatctgtggacagctttttaaaaaawtttttgggtacatagtaggtatatatatttatggggtacatgagatggtttgatacaggcacacaatatgaaattagtacatcggccaggtgcggtggctcacgcctgtagtcccagcactttgggaggccaaggtgggcagatcacttgaggtcaggagtttgagaccagcctggccaacatggtaaaaccctgtctctactaaaaatacaaaaattagttgggtatgatggcgggtgcctgtaatcccagctgcttgggaggcagaggcaggagaatcacttgtgcccaggagggaggggttacagtgagccaagatcatgccactccaatccagccagcctgggtgacagagcgagactctgcctcgaaataaagaaataaagaaagaaagggagagatagagagagggggagggagggagggagggaaagaaagaaagcacatcatggggaatgaggtatccatttcctcaagcatttatcttttgtgttacaaacaatccacttacactcttttagttattttgaaatgtacaattacgttattattgactgtggtcaccctgttgtgctgtcgaatagtagggcttattcattctttcaattttgtaataccccttaaccatctcccctggcccctgctaaccgcccatcctgtggttagctttggagcctttccctctatctcaggctccttccccggccaccagctctaccgagggagacgcagcctccttttgcttagagccagcccttcctctccatcctgccctcttctcacttctccgtcagatccggtctgtatgtctcctccacttgaggtgatgttggcgcctcccctgagaggttggatctgtgacctcgtctctgctgcctattaaggtcacttggggaactcttaaaaccacagacacccagaccccacccgacaggtgacccagaccctgggagtcggggtgaggggtgtccaggagctgtagtgtcccaagctccccagggaattctcggggacaggctggggcagcactgccgcggtaaacgtcctaccctgggaaagagaaacggctgtgagaaaggggcgctcctggactcgtgtgtccatgagtgtgtttcccttcttctcagcaagtttcccagttctgaaatccttcttgtcatcttcctgggtacccttaagtgagcagcctagtacccattttgagctattttgagaagccggaagaagaacctcattcctacagttagttactgtgatcctccctgaattataccacaagagaccccaatagctggggacggagggagttgagataccttgaggggcagattgaaccttgcggacagcggcagctccagccctgccctggaccggttttgttgggggaactgacccggctggcacccccaacaccgcacctttgtggtacatcagcctgtctctctcatttcagcctagatgtggccctcatggggccctcgtccatgggatgatccgggttgttctggttgcttctccggttcctgtatcagggtctttagagcgtgaggggaatggagggagggcatgggttgttctctggcttagaaaagaacctcaacgtttactgatcacatcggctctgagtaaaaactaactctgctctgaaacagaagtcaaggtgggtatcctcatcgggagagcttgctcagctcccatggtactgggaagcacaggatggagcatgtggcagggaagaggggccacaatagagtttcctaaactcatctgagccttagaaaccatctttgtgcttgttaaaagtgcagattccggctgaacgtggtggctcacacctgtaatcccagcactttgggaggccaaggcaggtggataacttgaggtcaggagttcaagaccagcctggccatcatgatgaaatctcgtctctactaaaaatacaaaaattagccaggtgtagtggcaggtacctgtaatcccagctacttgggaggctgaggcaggataatcacttgaacctgggaggtggaggttacagtgagccaagatcataccactgcactccatccagcctgggtgacagaacaagactctgtctcaaaaagcaacaacaacaacaacaaaacaaacaaacagattccccagcccttctcctggaggttttgctgcagcagggctgggctggggcccagaaacctgtatttttagcaacaagtgccctgggtggctctgatgattcaggggcctcagaaacccacagctagagtgtaggtttgtctcaatggatccagcaaccgtgtccctatgtccagcaatctcccacccatgtccctggacctctccagagcattggacaccactgacctggccaccctgaggtcccctcacaggatttcaggccattatgctttccaaggccttcatcctcccacgcyggtgggcgccagggtggctggggaatgggcctgggtgtctgaatgttgatcgcaccccgagtggttctgcgcacatcagggggaggaccctggggctctctggaggctctgcctcctcctctttcacctgcccctgagtgtgggtgtgcccctgaggtctgccctcaccctcttcccaccttttctcccgtgagctcacctgaccccacggcctcagctcccgcctccaagtggcaactgacagattttctaatatccagctcagttgttactcccaagctctggcagcctgtggcagcttcaccttggacctgctcttcctctggattccccacttgctgtccttgtcctaacttctgaaggtgacgtgtgaacggtgccctgaggctgtgacctgtggcagccctcacctaacctaaactctctgggcctttctctcctccccaccagtgagataatgcagggattacaaacagacgagataacacagggaaggcagcacatgggaggcatttaagaaagatcagttactttcataacttttattacatttactttattagttttattattacagacatagagaatgttctgctccatggggaactcaagcttttttctcatatccaggggagcgtttacaaaataggatcatgcacttgaccacaaagagcgttttaattataagttccctaaagtgagacccattaagcctaagcctccttaacgagaacatagcccctggaaatggaacactcctgcaaataactgccggccaaagaaaaagtaacgtctggacttatgattatgtagaagataatgaaaactgaatacttcctatcaaaatcggggagatagctaaagatgttttcggagtaaaagtgacaaactttgagcttattacttaaaaggaaaaataaaaaatacctaagtgttggaactggaaaaaaaaaataacaaaatccacccacaggaaggaggcggaaagactcagggcaggagcaggccgactttatgtctctgtctgggtctctgggtccctcctctccccatatcttggagctgtcctcccagccccctactgcaatcccccaaatccaagtctttaccaacacagaacctgtaaagtttgggccatcagagcttgttccgctgtcccgtccaagtccaagcaccctctagttgcagcctactgggcactgccctggcacctggtttgcagaatgtgggtgtgaggtcatgactgagccccttaactgggatgactcggcctctgctgccgaggctggagaccacgtctgttttgcctgctctgccagccccaagtcacagtgtgcacacctgggtcaagggagtaaatgaaagccgacagggcgaacatgactgttgatcggccttggcggtgagtgctgtcatggcagaaaatagtggccaggacgtagtggttttctattctgtgctatcttcagtctacaaataagtttatcagtaaagagccactgactgcgccagctatgacagtctaggagggtctggggagatgtactggctgtgctgggagccctctgtccggtcgctgttccctccgcccagtcgcttttccctccgcccagtcgcttttccttccatccagtcactgttcccttcacstggttgcagttctctccacctggtcatggttctctctgcctggttgcggttccctctgcctgtggctgttccctctgcctggtcgtggttccctctgcctgttgctgttccttctgcctgttgctgttccttctgcctgttgtggttccctctgcccggttgtagttccctctgcccagttgtagttccctctggttgctgttccctccgcctgtggctgttccttctgcctgttgtggttccctctgcccggttgtagttccctctgcctggttgtggttccctctgcctgttgcagttctctccacctggtcgtggttccctctgcctgttgctgttccttctgcctgttgtggttccctctgcccggttgtagttctctctggtcgctgttccccctgcctgtggctgttccttctgcctgttgtggttccctctgcccggttgtagttccctctggtcactgttccctctgcctgtggctgttccttctgcctgttgcggttccctctgcctggttgtagttccctctgcctggtcgtggttccctctgcctgttgctgttccttctgcctgttgtggttccctctgcccggttgtagttccctctggtcgctgttccccctgcctgtggctgttccttctgcctgttgtggttccctctgcctggttgtagttccctttggtcactgttccctctgcctgtggctgttccttctgcctgttgcggttccctctgcctggttgtagttccctctgcctggttgtggttccctctgcctggttgcagtttcctccacctgttgctgttccttctgcctgttgtggttccctctgcctgtttgtggttccctctgcccagttgtagttccctctgtctggttgtggttccctctgcctgtttgtggttccctctgcccagttgtagttccctctgcccggtcacagttccctccacctgtggctgttccttctgcctgctgcggttccctctgcctggttgcagttccctccgcctgttgcagttcccccgcctggtcgtggttccctccgcctgttgtggttccctctgtctgttgctgtcccctcctcctgttactgttccctctgcctggttgctcttccctccgcctgttgctgttccctctgccagggtcttggttctttctctctacctgggttacccagacaactgtaaggctgcctgtgtttttctccaggtctctgaagaaaaggaaagagacctctcatgagcactctgtataaattagactgcctcagcttactttttattccaaggcaccatcactcctgacacactttcctgtgacctctgtctgtctgttcactcctgcattcccacttagcgcagggcctggcatggagtcagcactcagtagctgaatgactggactgggaaaaatgaaggtcctgcgtgggaaggactgcggactgtgctggtgccgcgcagtcagccccacccagaggattgtgccaggctgcacgtgcgctgcacgtgagaaacacgtaatgaccgctctctaactcgagaaccagtgaccaggcacctcctgtgtgccgagccccgccgtgctccaccagggacmctgtgaagaagacacagccctgctggctggttgggagtcaaaccttctgcgacaaacatccatgcaggtgtctagctgctggggagccaaacaacgctgctgggggtcttgaggccaggggacagcacagcttagcctgagactataggaggaggcagaggaaagggaaggcagagaaaacatgggaggggacgcaagtgaggcctccaccaagacgctcttgttcacttggtcttcttggggcagttgtgaaaaaacaatcttttgcacctgcaggaggagttgactttcactgaaaaatgcaaaagagggcacagttactcttttccaattccgtgaccttgtttggccggagcccccactgctacgtgggacacaacacaccagaccctcagtgttggggcaaggaaggaaaaaggtggacgaagagctgttccctactcttgaggaacttctggtctagggggatcaagaggtgaacaaacaaatgctttgggacgccgctttcttcctcgtgaagctgagtggcacaggctgcagttaaattccttctagtactcgccttctaggatcttggtgtttgaaaacatcgttctccaggttcttctgttctgaagaacagcttcacgtccatcctgatgcttcagcgggggagcgggacgtggggactggtgaacttgaaccttgaaccccgagatggtgtcaaccctgaaagcctgggcgtggggttcatatcactccagtccaagcatcctataggcacctgtcccaggaactcactttgtcctgcccacactgggtcctcctctcagccgggtccctggtggccagcacgtcatccctctcaaatcatggggcactgacccctttccagaaatatggagtatttggttgaggtcttgccatgaaccgtaagaacgtcctctccctctccccctccccctccccctctccccacggtctccctctccctctcttgccacggtctccctctgatgccgagccgaagctggactgtgctgctgccatcttggctcactgcaacctccctgcctgattctcctgcctcagcctgccgagtgcctgcgattgcaggcgcgcgccgccacgcctgactggttttcgtatttttttggtggagacggggtttcgctgtgttggccgggctggtctccagctcctaaccgcgagtgatccgccagcctcggcctcccgaggtgccgggattgcagacggagtctcgttcactcagtgctcaatggtgcccaggctggagtgcagtggcgtgatctcggctcgctacaacctccacctcccagctgcctgccttggccccccaaagtgccgagattgcagcctctgcccggccaccaccccgtctgggaagtgaggagcgtctctgcctggccgcccgtcgtctgggatgtgaggagcctctctgcctggctgcccagtctggaaagtgaggagcgtctctgcccggccgccatcccatctaggaagtgaggagcgtctctgcccggccgcccatcatctgagatgtggggagcgcctctgccctgccgccccgtctgggatgtgaggagcgtctctgcccggccgccccgtctgagaagtgaggagaccctctgcctggcaaccgccccgtctgagaagtgagaagcccctccgcccggcagccaccccgtctgggaagtgaggagcgtctccacccggcagccaccccgtccgggagggaggtgggggtcagccgccccgtctgggagggaggtgggggggtcagccccccgcccggccagccgccccttccgggaggtgaggggcgcctctgcccggccgcccctactgggaagtgaggagcccctctgcccggacagccgccccgtccgggagggaggtgggggggtcagccccccgcccggcccgccgccccgtccgggaaggatgtgggggggacagccccccgcccggccagccgcctcatccgggaggtgaggggcgcctctgcccggccgcccctactgggaagagaggagcccctctgcccggccagccgccccatccgggagggatgtgggggggtcagccccccgcccggccagccgccccatctgggagggaggcgggggggtcagcgccccgcccggccagccgccccgtccgggaggtgaggggcgcctctgcccggccgcccctactgggaagtgaggagcccctctgcccggccaccaccctgtctgggaggtgtacccaacagctcattgagaacgggccatgatgacaatggcagttttgtggaatagaaaggggggaaaggtggggaaaagattgagaaatcggatggttgccgtgtctgtgtagaaagaggtagacatgggagacttttcattttgttctgtactaagaaaaattcttctgccttgggatcctgttgatctgtgaccttacccccaaccctgtgctctctgaaacatgtgctgtgtccactcagggttaaatggattaagggcggtgcaagatgtgctttgttaaacagatgcttgaaggcagcatgctcgttaagagtcatcaccactccctaatctcaagtacccagggacacaaacactgcggaaggccgcagggtcctctgcctaggaaaaccagagacctttgttcacttgtttatctgctgaccttccctccactattgtcctrtgaccctgccaaatccccctctgcgagaaacacccaagaattatcaattaaaaaaaaaaaaaaaaaaagaacgtacttttctacctgtgtacgggtcggatgggggtgtttttcttttcttttctttcttttttttttttttttggtgccacattgtccagcctgtgcttctctctttagctgtggtcgccaggggcatgcgtggcagatacccactgacaacatttccctgttccaagtgatgaacacaaacccttcaaaaggagcgtcccctggactcttggaaggaaactgacaccccaccaaaatttctgggccttccaggaagcgaccttgctttggtagcctccaggctgaggccgcagcctctcactggcctgtccttcttaggggtgggcctgggggctcgtgtgtagctgcagcctcctcttgctggggcctccatggcagttgggatgcaaaatccatctaccctttctctgcttccttattttgaaagtgaagcatggatactcaaacatcaggaagcagtcaagacctccccccttccctgcttcagactctatagaatgtaaggaatcaatgggcgtgggcagctcttggcccttctccctgggtctatgatgctcccagacgtccgggaaccacttagtgaatattcctctgtccatggtcccagccacagaacctgggagggagaggccagggctgtctcgcaggttctcactcaactggatcttttcagaactcttgtaattactaacgggtggggtatttaaaacaagatgaagttactatcattttcttaatataggaggccggcgcccacgctccgtcagttgggattaaatatagaaatgggggcatctcagattgccgcccacagaacagacagcggcacacgggctccgagctgtgaactgccgccttgggtttgcaggcaagcctgacccagtcacgagcmaggccttgggagaagaaaatgaagccttatttttaagccagttgacagatcaatacttaaaaacaaaaaaacacaaaacaaaaacctataagcagttaaatgttacaattaaaaatacctttggtacctaacgtgtatacattagtggccaagaaagtcttttttttttccccgtaattcttgaaataaatgcagctccaaggacggcgggtcctacaattttgttgtcatcttttaaattacagatcttgggagatgaggactgcctgcggtggactgtaatgtgccaaagttattttccaacgttggcagcacccgttgtgcctgcggtgggggaaattgatgaggcttttcagtaggaacctggaaagaagcatcttggaaaaaacttaggcactcgatattttaaatacagcggaagaaagtgaaagggagacagtgrcttccagcgtcagaagcggggtggctccctctggcaaggcaggggcccaggtggacagtggtggcaagaaaggcagttgtgaggaaggcactatgtttttctgggttgttttcttaaaatttagttttctcagttaacacattgattgtagtgtcttgtgtgtgctgtcatagacacaggcattgtgtggtagcagtctttacacgcaggacacgatgggcacgtggctttctaatgatctcacttctgcagggaccatctgacctcattgctctctctcggtggcaggtaaccagcaggcttggcacgaggccctacaacaggatgcccagggttgtgtctcgccggtaggagagggcttgtgatcaacagtggttgattaaaatctcagtttttatgagatcactttccttccctctaagtagccagcagagttcagctgacacacagaccatggtttttctatgtttttctcaagcccactggatcgacactaaaaagtgcatttgtgaaaacacagactggggtgggtggaggctgaggcactggtttttcgccaggtccgtcttctcgggtgggtttctgctcccgcctctgatcctgctgcctcaacacctgcagggactgggagccttcgctgtcgcaaggccaaacgcttggtttttggaccgttctaagtgtttccccgagaaaggttatctcctgagtcgtaaagttggccttgagttggcccaggatcctactatgacttctctgggaggtgcagatgacctgaagtggacaaagatccttccagatgagatcctttgggagctcagagccctcctgcctgctgccctggccagtgtccatgaggccagcccaggtcttgaaagacctccttgtctgccagagtcaggatgctacaccgtcctgatttcccaccgctcgtgagtcactgttccgggtccttagaataaaactccaggtgtggggtataatctgataatagacacacatggtgggattacgacagcccccctggcctgggccccagaatagcactgactccatccaccagtcttggccttttccatcgttagtataaagttgttgtttcatagcaggtctgccgctgatctaaactctgcgtggtttcccaggccggtgcgtgtgtgctggctgctggggctggaggaggctgtccctgtaaatgtcaccgtccagctcacacagcaagatcattttgagtgtgggcttggttttttggccggtcatcaagctcacctggctttggggtttctgggaccggatgagcttttcctgccctcatctgtgactaattcttgacgcaaattgttgcctgaaggagccacatactttgtggctggggcagcttgcttgggctggttgtgacctgttagtcaacctgcattcattcattgattaattcattcattcagcaaccatttcctgagcaccagatgccagctctgtgttgggtcagggacacagggacaacgaggcaggtcctcacccagtgcaggcgtccatgtcacatcatgcagtgtggtctgggggtgccgtgtggagcctgcaggagcatgggggtggtgaagagggtattcgcacaccaggcactcaatagccgctcacatcttcccctcggggttgactgtcacgtgctttggatcctgagcggttttcagtaacatgaggtcccttgtggagtctcataccaacaaggtagccttttggataaatggggcaaaccccggtttgaaggagctgattacaactccttccatttattctctcattctgcttttcaggatggaagaacaaggggttaattgtaggcacttcctaagttctgaacattaaatccaacacgaacccttcctttccctcctccttcccccacagctaaaccaccctgagttgatgacaccagctggtggccagcactggacactctgggtctgtgactttgaacgctccttcctgcaatcatcttgggaagaattccactctggactcgatgtcacaggacaggatggggaggcaacatggcattgcctctggtggcccaaggtcaggtccggtcccatcctacccctagtggtgtgactttggaagcgtgactctccatgtgtctggttcctgacttgtagwatggagacagggaggctgctgcctcatcgggtgttgtccagtgagacccggtgttggtcattctgtgtttgtggagagggaccggccgcgcatcaggatagggtgctgtccggtgagattccgtgtttgtggagaggggaggggccggccacacatcaggatagggtgctgtctggtgagattccgtgtttgtggagaggggaggggctggctgcgcatcaggatcgggtggggtccggtgagattctgtgtttgtggagagaggccggccacgcgtcaggatcgggtggggtccggtgagattccgtgtttgtggagagggccggccgcgcatcaggatcgggtggggtccggtgagattctgtgtttgtggagagggccggccttgtgcatcacaggatcgggtggggtccggtgagattccgtgtttgtggagaggggaggggccagctgtgagwcatggactcaggctgcctcagtgaacagacaaagttcacggctcatggcactgactttgcagccgagttcctctatgtgacatgctgggccatgcctggcaccagcttccccggcaatgccagccgctgccctcagcatccagctcacggcccccagcagcatcaggaccctgtgtccatgtgctgtcctggctcctgatgctaggctttggtgtcccttccttaaaactcctgcttgtccctggctcatttgttcctaggaggaccctgactagctgctggatggcgacgtatctccccctgaggaaggccacatatagtgcacatttggtgataaacttctcacatactccagttaacaatgtgtctccccagcacacacggtcctgctggaatcctgctggctcatcgtcattcctgtgctcagctgttgtcacttcatcaccaggttgccattttctgaatataaatggtcagcgtttcatggcaaatgcagctggtcctggcccccattggaggctgacagagcttctgttggctgcccagggcagtatttagagttggtctgtgggaaatgccgtggaattccgtggcacacctgtgctggctgtgtgtgtgagtgggaccactagtccagctgttgtggtcacaagtcagtttctttatgaggcagatcaacctagaagaactcagtctgtgggctgcagctctgccgctactaagccccttaaacacacgcacacacgtgccctacacacacacacacacacacacacacttgcgctctctctctctctctctctgaagccatgacctagtacctagtcaggaggtggccgggtgggcctctctgccctctgtgtgtggcgtccggtaaggggaggccgactgtcctctgtgccctctgtgtgtggtgcctggtaaggggaggccgactgtcctctatgccctctgtgtgtggtgcctggtaaggggaggccaactgtcctctggatccctcctttgcccacctgagccaagtgtgtggggttctcagccagcatgttacctggtgttctgagttatttcatttttctttccttttctgttcagcctccaaacctcagatctgtccccaaagccctaaattaaattagtgttcagctcaacagatgtccaccaaatccccacatcccatgatagcagctgccattgctggcagccacatggtcatcccatttgctcctcagtcaccttgcctgtgggcgccgtcacctcctctgcctgacagacactgagcccacggctcagggagggcaacctgcctgcccaaggtcacccagccggcagtggcggaggtgatggggactcactcccagccaggctatggcagtgactctcacactctagacggggacagagggactcaagcccctccaggcatgggcgatgrggcagggggattcgcaccaggcctcattccagactctgctcctgaaccacactgtggtaggggcccactcacaggtgggtgtggttaattcagaagctgaggctgccccctccaaggaagccctcgatattgacacacggatgatcctattctgttttgtgttttcacttccttgccgtcctgggctagggacctggcccaaccgtcctctaccctgtgagggctgggcttgctgggcctttatggaggccccttgccatgggagagagaccaggagagcctggtggtggcttagccaacctgcaccttctatttccaataacaacataaaaccaccttgcagaactgtgagagccaagccacctgaagcccagaggtgccctgccctgcctggcacccggagcggcatcttatttgcctgggggagaaaatccgctgcctaggattctttcccttgccaaacagctattttcccggtatttcacctgcactctttcttcagaatcggacctccatgtgacttagggcctccgttgttcatttgaaaatggggatgctgattgaaaaatggagatgcacctgggcgcagtagctcacacctgtaatcccagcactttgggagaccaaggcaggtggatcacttgaagtcaggagtttgagaccagcctggtcaacatggcgaaaccccgactccactaacaatacaaaaattagctgggcatggtgacgggctcctgtaatcccagctacttaggaggctgacacaggagaatcgcttgaacccgggaggcagaggttgcagtgagccaaggttgcaccactgcactccagcctgggtgacagagagagactctttctcaaaaagaaaaagaaagacggggatgctgatgcccccagcacaggttgagccgaacagatgccccaggtgtttgaaaggacaggcgaaagtgcagcgagcgtgaacctggcccctcctcccctcacctgtsctacctcatttagcagcatcttcttatagcttctgtgggaaaagtcatggtaataaaaacataatgctttaatcaataacacccatgtctctgttttagctttttattctgggaatgctcagatatacacaaaagcagagtgtagagcatcccaagcccctgggtattcgtctcccagcaccagcaatgggcaacacctgcccgttcctgcctcacctctttcccactgcggtatttcgaagcagatcccagatattgtatctaaaagataacttcctaccttgaacacccacaatagcgctatcacatcctcccaaacacacttataagtccttagtatcgtcgaatacccaatcactgttcacatctcsccaggtgctcatctttttctctagttggtagagtccagatgcccacaagatgcgtgcctctcattaggtggatgtgtttcttgaagaatggggtccccatggggggcgctaggtaggagctgagcagcagggggccctggctggcctctgctcggggcccccactaattctgctctttccagcttcacctgctggatgctgtgggcatttgattcccaccctaaacgtgactgtacaagtctggttttcgcttgtgggatggagtctggttttctgcctctctctgggtttattaggaatcattctgtgtccttggctgggtgcagtggctcacacctgtaatcccagcactttgggaggccgaggcaggcagataacctgaggtcaggagtttgggaccagcctggacaacatggcaaaaccctgtctctactaaaaatacaaaaattagttgggtgtggtggtacacatctgtaatcccagctactaggaggcggaggcaggagaatagcttgaacctgggaggcagaggttgcagggagctgagattgtgccactgcactccaatcttggtgacagagcgagactccgcgtcaaaaaaaaaaatcattctgtgtcctagggtgaatgtacataactttctaaaatttctaataggtattaagttggttaatatcactttgctgcttttgtaagtcaaatattgttgactattggcaatttcatgtagttcaacctaagtaaaggtacattttaaatttttaagtgaaataagagtcaggagcggtggcctactttactcctgtaatccccacactttgggaggctgaagcaggaggatcacttgagctcaggagtttgataccagcctgggcaatatagcaagaccccatctctgcaagaaaataaaaaataaattaaaaagttatggccaggtgcggtggctcatrcctgtaatcccagcattttgggaggctgaagtgggcggatcatgaggtcaggagttcaagaccagtctggacaacatagtgaaaccccgtctctactaaaaatacaaaaaattagctgggcatagtggcacgtgcctgtagttccagctactcgggaggctgaggcaggagaattgcttgaacctgggaggcagaggttgcggtgagcggagatcgcgccagtgcactccagcctgggcgacagtgcgagactccgtctcaaaaaaaaaaaaaattaaaaattgaaataattgtaatatatgtgttgtaccagggatgagaactgggggtgggggaccagcatgtgcacagtggtggtccatcaaataagagagactgagtaaaagcggacatctgcagcccgagtattctccagtattctttcagtgagtctttgtttgtttgtttgatataacagctgtactgacgatgatccacataccacacatttcacctatttaaagtgtactggcctggctcagtagcacgactgtaatcccagcactttgggaggtraggtgggcagatcgtttcagtccaggagttcgaggccagcctgggcaacatagcaagaccccatctacaacaatattagccaggtgtggtaacatgtgcctgtcatcccagctactttggaggctgaagtaggaggatcacctgagcctggggaggttgaggctgcgatgagctgagatcacatcactgtactccagcctgggtgacaaagtgagaccctgtctcaaaaacaaaaataaagtgtacaagttgttgattttttttttttgtatttkcacagagttgtgcaactactattgccgtcaatttgagaccattgtcattactcctacaaagagaccctgtacccattagtggtcattcccatatccccctaatcccttatccctagggaacccctaatctaccctctgtccccatggacttgcctcttctgggtttttcctgtcaatggcagcatacagtgtgtggtctttggtgtctggctccttttgcttgcatagcgttttcaagcttcattcctagtgcagcgtctattgttccgttgtatggacaggccacattttttttctccattcatcatgtatggacctttgagttgtttccactttttggctgctatgcgtacatgctgctgtgaaagctctgtacaagtttctgttgaacatgtatttcttctgggtatctgcctaggagtggaattgctaggttatacggtccctctgtgtttatcctcttgcgaaacttcaaactgtttccaaagtacctgcacctttggctcccactggcagtggaggagggttccagtttcccccacatcctcgccagcacgtgctgttctgtgacttcaggattgcagccatcccagttgatattgtaacaaaacttgcccagcagggtgagatatctgtagaggacaggaaaagggctgttttgttagtggcttggcatatcagccatggtcgtttttttcaaaatctcctgaggaagccccatgtagcgcgtgagccacagcacgtgcggccgagcaccctgcacccctgctggctgcggcccttgctggtggctagtgggaggggagggctcgagttgtaacttgtttccagggtgtgaaataatctcctctgcctccgtgtctcatctgccgcatgtccctttctccgcaggtgtgaccatgaagctcatggatgaggtcgccgggatcgtggctgcacgccactgcaagaccaacatcgtcacagcttccgtggaygccattaattttcatgacaagatcagaaaaggtaaccactcttctggcaaagacgagggaggcagtggccctcggctgcttgggtccctgcaccagtttgttttctgttcacacccagggtcatgtgggccttggtgtgtgcccatctgccacagggaacaggaagctgaggtttctttctttgtccttgctgtttattgacttgatgtttcaatctggtaaaatccttgactcagatatgacggggccattatcctcctaaagacctgcctaaactcaccctctgaaaacgctccacagacagagctctgggaaggtcctgtgcctgcagctgccacgaccctggacaccaaacctcatggcagcacatttcattttgggagcggaattaatgattcatgatttaggcagtggcagggtcagtacagaaaagcccgcaggagcccctcctcggccagccctgcccacgccacccagggcagcactggcattgggtggtttttctccaccacaaaaatccaaccccagccacctggcccctgcctggaaatggtgtcagctgtccctggggtatgtgtgccagcttgacaggccaggcctctgcagtttgtatgagcagaggtcaccatgcttgtcttatgtgactgctctctgcagaagtacagtgaagtgcacctgacacgtggtgatttttgtcagtgtgacgtctgctgagatgaggccgtgcaccccctgcagcagcactgcctcacagaccgagggtggtgtcagcatcgtcagggcctggtgctgattctgaggacaccacctcattaaagcggcttgttggaggagctgttggctgagaccagccccttgtcgtgggaagcgagagtggaagaagtgcaagcttggctctccttgccacagctcctgcccaccagagcctgagcaggggcagactcccaggccccgggtagcccagccttggtgctgtctccggcagctgctactgcagaacacacctggcaatgggagaccctggactagggcagaagcacctaagattggaatggtggagggctgcctccctccctggaattactgagagaaggctaggctcacacatgctggattttggatgctttgtggtaaggagaaggaaggtctctggcgttgctttcttccactttgcagaatccttttcttttttccacaacacgatcttattctgtcacccaggccggagtacagtggtgcaatccctgctcactgtagccttgcacttccgtgctcaagtgatcctctcacctcagcctcccaggtagccaggactacagacatgcaccaccacaaccagctaatttttgtattttgtattttttgtagagacagcggctcactcagaatcttttcttgaccaatagatgtttgccacaaacatagaccacaatgtcattttagaatctgcccaaaacaagtgggtcctctgtgttttagctcgtcccccacaggcctgtgtggtgcgtgactctgcaggagaatctgtggcatcatattccatgctattttttctaggactcctgcctgggtaaatcacgattagggtgaccttgtgaaagacggatgcacagcccatagtgggaaacgtgcattccataggacttgccgtgctcagttgtccctgagtgtccttggagaaccatcaggaaagaaatagactttctggctgagcgctgtggctcacgcctgtaatgccagcactttgggaggccgaggcgggcggatcatgaggtcaggagagcgagatcatcctggttaacatggtgaaaacctgtctctactaaaaatacaaaaaattagccaggcgtggtggcgggtgcctgtagtcccagctactcgggaggctgaggtaggagaatggcgtgaacctgggaggtggagcttgcagtgagccgagatcgcgccactgcactccaggctgggcgacagagtgagactccgtctcaaaaaaaaaaaaaaaaaagaaaaagaaatagactttccagcgaagcacaaaacacaaaaattagccaggctggtggcaggcacctgtaaacccagctacttgggaggatgaggcatgagaatcgcttgaagccaggaggtggaggttgcagcgagccaagattataccaccacactccagcctgggcaacagagcaagaatctgtcgcaaaaaaaaaaaaacacaaaaaaacaaaaaaaaaacaaagtccccacccttaactccttgtacaaccagaattaacttttaagggagagtgctaggaggtgtgttgtggttcttggtcaataggaatcattaattttgagggaaaaccaggaactgcagtctgggtcgaatgctttttccaggaattaacttagcaacctagaagacatctggggcaactcggacgaggagctgctttgccaaaggctttccacaaggctaacggggggacttaattttcagaagccacaatttctggcaggacattcacttggattggcttccttcacgcagtgagggcaggttgggtgggctcgcctgattcccgctgtcccaagccacacccagggcctgacagtgggccgcccaggcccccacctcgtctcggctgtggccggggcctcctgggtaaaacactgggccccttaccagaaacagaaagactgttgttttcttagatgacatcttgttttgtgtatagaggaatttggaccaaactgaaatagcagccatggagtctggcctgtttctatgccagtatcctccagggcccactagactctgtcacatccaggggccgttgaatgctgtcacactcgtgtgttgttttccagaggattgtcacacctgccaggtcytttgcagggaggcgagggctgtgctggccgagtggggccagggttgtcagagcagggtcatcatgcttgctcctaggatactgcaccttagatcagctcgctgcctcccacgcttgccscttggtagggaaacagagcgaggctgtgcggggaggcacggcccctgctggctctgggytctgggtgacactgggtgggtgtgtgagaaaccgcggggggctggcctcacagttccagcgtgactttctcatggactctgctggggccgctgtacaccctcgagccccacacctgcctctcacttcgaccataccatgaaggaggtctcgagggccagaccctgctgccctgccgggtgggggcacacattattgtggactatcccagtcggtgtcaagagcccagggagctactggcaggcacagaaacctcacctcgggttgcacgtggtgcctggcagagctttgtactgtagagaatgggcattgctttctggtgggctcagaacaacagacatctgttcgcccccagttctagaggccagaattctgaaatcaaggcgtcagcagggccaaggtccctctgaagtcaggggaggatccgtccctgccccttccagcttctgggagcagcagctgttccttgacgtttcttggcttgtggctgcgtcactctggtctgtctctgtggtcacaaggcctcttcctctgtgtgtctctcctcttctgtctcttataaggacacttgtcataggatttaggacacacctggagaatccggggtgatctcatctcaagaccttttgcttaattatacctgctaagacctttattccaataaggccccactctgaagttgtgagtagatgtatcatttgggaacccactagaaatgctttgtctccttaragctcaactcatgtagatactagctcacttccacttttataaaatcatgaacttgataaaatcccctctgggattcaccagccccaagctgcctctgtctctgtggatgtgggacctgcccttgtgagagccagcagtgaaattgacgtcagcctggagaaggggccactctaaggaatgcagggagagtgaccccagcagtcccccaggggccccccacttttgagaagagcagtcatacagctggcaaggggctagctccggaccctgacttcagagagcagcctcactagagccaaatgagagtctctacagttagcaggcctaggggctactgatgaaggaccagggcctttcctctaaatggcagggagtcagggtcagtgtcagaagtgagaacggatgtgacgtctcctccataagccccagaaggcagcggttttgtaataacaagaaatagtcgcatagaccgagggttgcagttctttgtgttggggtgttgtattagtattaaccttaagtcaagtataaatttaatccacataaggattacttttaaaatcatacgtttatggaaaaggtgcctgcaggtagactgggcacatccaggcggttggagcctgagggcacagcagggccatggcagccggtcacagcccgtgcccctcatgtgagcagccctgagaggccactggtccccctgggaggaaaccccctacctcccacaggctgatctgccacagtggggaaaagcccaggagttgagacccgttgccagtcatgtggcctccatgagtttcctggggctgctgtaacatttccatacacagtagcttaaaatagcctgcactcactctcctgtaattttggaggtcagaagtctaaggcaggtctgcaggctgcatcctaccaggagctggagggaagaatccatgtctcgcctttcccagcgtctgaggccacccacattcctcggctcatggtcccggccatcctccagcctctcctaacagcatcccattccycccctcgtgctgacactcctgcctccctctcacaggacccctgtgattctatcaggcccacccgggtaccccagaacaatcttcccatctccagggctgtcacttagtcaatgtctgcagagtcccctttgccacgtgaggtcacaggttcagtggatttgggtgtgggcatcttttgggagcacattattctgtcttagcaggtggaagggggttttctgatgtgcccatttcagcatattttattagaaaaatagctgggcctgggcacgatgrctcaagcctgtagttttggctacttaggatgctaaagtaggaggattgcttaagmcaggggttcgagaccagcctgggcaacacagtgagacccctgtttctttaaaaacaaaacaaaacaaaacacacacaaaaaaagcaggctggtcacagtggctcacgcttgtaattccaacactttgtgaggctgaggcaggaagatcacttgagccctggagtttgagaccagcctgggcaacatggtgagrccccatctctacaaaaatttaaaaattatctgggctactcaggaagctaagggaggaggatcacatragcccaggaggcagaggctgcagtgtgagccgtgattgtgccgccgcactcagcctgggtgacagagtgagaccttgtctcaatttaaaaaacaaaaacaggctgggcgtggtggctcactcctgtaatcccagcactttgggaggccgaggcagtctgatcacctgaggtcaggagttcgagaccagcctggccaacatggtgaaaccccgtctctactaaaaatacaaaaattagcygggcgtgggggcaggcgcctgtaatcccagctactcggggggctgaggtaggagaatcgcttgaacctgagaggcagatgttgcagtgagccgagatcgtgtcactgcactccagccggggcgayagagcgagactccgtctcaaaaaaaaataaaataaaataaccagaaaacagtgggaatgcggaatggagacgccagacctgtggggtggcttctccagatttaaggcaggaagtgctttgctttctctccttcagcctcccgtaaaactgcctccttgggagagtgaccttttatgcgatattgaccaagtgccaggccctgtggctgtggcttgccctcgcttgggtggggtgtctgtcaggaagttacacggacagctttgcttcatccagacattggcccaggggttcagaagataactttgagtttcagccacgaagggtgtgtgcctaggaggaacttacgaacttggggcacttgtcgtggctgggagaggcctcacccgcggccatggaggccactgccaccctgccgtgggcccagctctgttggctgcaaatttggcatttatgaaccagactcttccaggatgccccacacttgcctagaccacagagggccacctctgttaccctcacccctcaccagcccaacccagtgccacctccattgtcacagccttttgacgctagggacctgctattcctctgctcacagcctccgtggctccccgtgacatgccacattcagcttgagcccctccagctggcacttcaggtctgctaggacaggctgccacttgtcatagctgtccccttacacctttgcgccaactagcccggccaagcacctacggggtccttagcaggtgtgtggcaagttaaactctcaccaggcagttggggtgaaggaaggaccgcttcatctgtgcgactggatctcatgggaaatgggaagtgcccacccaccaaaggcgcgtggagttcccaggccagcaacggagttggtgctggggacgcgagggccacgacaggctggagcccgcacccaggggaccagcacaggggaaggcacgtggagcccgstagcacccacagagtgggagagcctccgccccccaggcaagcagtggagcccctaatgggagctgtggggtcacttgctgtgtggatttttttttttcagttgagacattaaaatgtccagaggtagctggtgtgaaaaagttatatcgttgccttcagtgtaatagttttggaagcacttggtgagaaaacctaaagttgacgttttcttggggagaaacgatctccactattagggtgaaaaataaggagtcttctagaaaaggccttggggtgtgttatgtaagaaatactaagtcagttcactgtttccaggcttttcttacgaaagttaacagccacagctctttttggagcataaatgctgagcttttcctaaactctgaaacacttggcaacctctcagtcttgctaacagctattttttttttattttgttttcttttccaaatccctggcatactgctgaaatctggctgctgccgcccctggagagacgcccgtctgctgggggagtcaggctggggtacctgccagcgctcacgggctgtgccactccaggcaggctcaacaactacttcaaaacagaaagcggctgtaattcacaattcagcccactacaggcaccgatacgtttaactgtacctaatatgacacacttgatgccaggcattgtgccacctgcttcataccatttacttctcacacagcccagtgagacagggactgtcgctatctctgtttgtttttcccatttggaagctgcaattccgaggggttaaggaagctgttcacagccatggagctggttccaggtgggactgggagggcaggcccagcagctggtctctgggaccagagctctgagcccatgctttggtgtccccagygacctggcctaaaccccacctggcatccgccccgtcagggcctcgagtgtgagtgatgaagcttgaccctcattgattacatgcggctacagccacctttgaggcctgccctggactgcggagtgactgcacctggtccccgtgcacttgtgccggaactcctggctctcaggcagcttgaaaatgcatcrttaagctgggcgcggtggctcatgcctgttatcccagcactttgggaggccgaggcaggcagatcacgaggtcaggagatcgagaccatcctggctaacatgctgaaaccccatctctactaaaaatacaaaaaattagcttcttgttactttgtggtatgattccttttaccccctgcaagcctctccagcggtgcccctggggcacactcaggccccaccccaaattactgtcctgggcctgtcatgtgacataatgaatgcgggcagttgacatcagtatagcctcagagcaaggatagaaccacatgggttgactgtgtctcctttaaaaatgtggaggaagttacccccaaaatgcccaggtggcctgtggagcccctgatgaaggagagccactgtgagtgggtcgtggctgggtctgctgctcccctgcattctctgaagctgggtgcatggggaaagcatttgcagatgaggaaactgaggcacagtgcagtctcctggcttgtccctgctcagtggccaagcctggatttaaatccaggcccatctgactccaaagccatggaactcagggctcctcccgcatggcttcgtagcctccggagactggccttgacaggtatttgctccagggcctcgaagagccctgcctttcctgatgagacactttgtcatgaatatctggcttcatcagggccctggctgctgtacctgctacagaggctcagagaggaccaggcgctccccttctggccgccttccccagaactaaacaagcatccacacctctcctaggtgggcactgatccgcccgctcagtgggagatgctgttcttggttaatccatttttcacctcaagctggtcccacccatcttttaaataaaccccagccaccttgactgcaggtgcatttggacgggtgatgtggtggagccatcccaaggcagcacctccgctcgtgggctgattgtcaggaccaagaggtctttttgaccccacagagccctccgagtcttggctgccttgttatggcaggtactggcactgcttggggttgtgtttgctttggtttctgagacaggtgcgtggaagtggatttgaggytctctccccttcctcggatgggccccgcaatgtcccaactttgcctagtgccaggttcgccacaggatacagacagacactactggtatacaaggcaggtgcggaccccccttcctgcccttctcatgcctggcgggagggctgaatcaaggcagactttgtgggaaggaggcctgagctcccctcattgctgggagaccctgaagcatcctgacctctgtgtgacacgccaggtctgcaggcagtgcttgtcgggccctgcctctgcctttcctgtcaggttcagggctcccgagagccacctggacacgctgtcttcagctctctgatgcatgaccagcctcacccgcctccacatttggtggagggacctgtgggcatggtcatgatttggccggcagcctggatggtccaggctctgacccagtgggaggaatgacagcacatggctgcgccatggaggaattagcaggaagggcggaatcagtctgtgctgccccgtgggcaggtgacggccagcacgtgactgcccccaggctctccacccttttgcagggaggaagggaggtggacaggtgtggggctccagggcaggctgcttccaggagtggcactgaagttgagactggaaggaagtaccggccagcagggcttggaaggggctgctggccatgctcctgggcactcctgattctgggctgctcagcatccacttcaggaggatgcaaacctggggctctaatggggctctggccagcttgagtctgtggtgacctggtgtccacatgtgacccacaccccagccctcgtgggtccccagaggggtccagcctgtcaactggatacctgctttgggccccctgggcccagccctgccctcgtgggacttccaggctagatggrgacagacagacaacagtgaaatagacaagccaacaagtgtgccaatgcaaatggggtcgttggctctgcaggagtggaggacagttctagagggggtgtggtggagggggctgagccgccctgggcagctctctggagaagggatgcttgagccgaggttcagaagatgaaccagatagctgtaagaggagggcttttctagggagagaccacgggggccaggagcttcagggagctcacagaaggccactctggtggggtgtggaaagcagggggcaggctaggggcccytgtagaggctgaggccagtcgctcatcaccccaaccccacctggatggacctccgtccccagggaggcctcgatgctgcaggggggcctctatgtgacctggaggaggcggagaggatttggtgtgcgcctcagccgccatcctggggttgacaaagtgcctgtagctggaatgctggaattctttttttttttttttttttttttgagatggagtttcgctcttgttgcccaggctggagtgcaatggcatgatctcagctcactgcaacctgcgcctcccgggttcaggcgattctgttgcctcagcctcccaagtagctgggattacaggcatgtgccaccatgcccggctaattttgtatttttaatagagacagggtttcaccatgttggtcaggctggtctcaaattcctgacctcaagtgatgagcccgcctcggcctcccagagtgctgggattacaggtatgagccactgcgcccggtctgtagctggaattcttcaggaagggctagagcaggaacagagccctgggggtgggagctggtccccccgaggtcccctgggacagtcccttcccagaggctgcctgtgagaccttggtgtcatgtgtgggatgtgccttctgagcccagggtctaggagatgggataccctaaaccagggcccctggaaactgggctctctsttggtgactgggacttgtgattcgtctgtcaaccctaggtttcaaattaagtcccagccagtgaccacatcagatttccagtttttttctttttttctgagacagggtcttgctctgtcacccaggctagagtgcagtggtgcgatctcagctgactgcaacctcgacctcctgggctcaaacgatgctcccgcctgagcctcccgagtagctgggaccacaggcgtgtgccactatatccagttaggtttccagttttaaagtatttyactttgtcctgctagccaaccttatagcctgtgtcttgtttagaataatgatgttgctctctgaagggtgaaaattctcagattttggttgtaattgaaaattttcctgacatttatgaagtgttaattgtattatggaccacaagaggctctcccagacagcattctcttctttttgttgttacgtctaatgcttttataatcaacctacttagttgtttaaagtcattgttgattgctgttaggagtttcttcagatttctaacacagcaattaagccatgagcagccaggatctggccgtggcagcagtggccaaggtgggccttcatgggcaacaccaagagcatgtttttggagcctgggcggagtggctcacacctaattataatcccagcaatttgggaggccgaggcagttggatcacttgaggccaggagttctagaccagcctggtcaacaagacaaaacctcatctctacaaaagatacaaaaatcagccgtgcatggtggtgcacgcctgtaatcccagctatttaagtgacaggtgtgacagtcgcttaaacctgggagacagaggttgcagtgagccatgatggcaccactgccctccagcctgggcaatagagcgagactccatctcaaaaacaaaaacacgttttctgttgctcctcaaaactaagagccagtgttcaaagacccctggaacctgccctcctccaggcaccacgctcatgggtggcccccgtgtgtgacaccgtggccacagggaagttcttgttggtttctgctcatggaaagggcttgttcctgctttttggcctgtgactcccaagtgttatacacaattgttggtgagggatgtgggctgggcattgtgaggaaggaggcagagatgctgggagaccctcaggtctgacctgttgaaacttctagctccttagctggggcctgacccatggcctgccctcctcccggggtgcgtcttgtgactgcgggcgctttgcatgggactctgtaccttacagctcacgtaatgcctgctggcgctgaccacacagctccttcctcctctcccagcactggcacgaagtgctccctgtaagtatgaagttgaatgtagcatggatcgttctgatactttttaacatggaataaccgctcttgcctctggcctgctaaccgccctccaacagccaccacctggccgctttctcactctgggtctctaaacctgccttgtgaggctggtctcggtgcagctaggacactgggggttccagaggccacattaaaaagtccccgaagccagatatatttcctggggagcaagtcccagcagccagagtcgggcagggatatccttgagcctggcccagaatagaggccacgctgggccgcctgggagggcattctgaccgcagggcagcacttgccccggaagtccccgggggtttctgcagcctggtggccagtgacatcgatggtgacaccttcccggggccccaggtcagctcttggcttgagtccttccatcccrtagctatcccccaggcagggtgtctcatgcctgcctatagggaagagctgagctccctgagattaagggattatgttgaggccaggtaggaggatggagcccaggccggggagggtggygggggcagaagagcagctctgggtcaggaagcttctgccaggatggactgtcgtgccctggggagcgtggggcgtacagagaggttggttagggttgagggggagagagggacatgggaacaatgtatgggaactggtgactttggactttgtcatgattcacagagaaatggggctggtgctttgagcatggaggactctggccaaggggtgtggcatccagcagcccagaggaggaagctttggtcccgtgggcgagaccagtggggccagaagggaggcttggcatgcagtcacataagattcaatcccaccaaggggcacgggcagctgccctgtgtcactggagcccctgagggtgggaatggctgtggaaggtgatacaaggttctgtcttggtgcttggagcagtgtagtggggcagctgtggctccggtgggcaccagcaaggccaatgaatggacagtgcagtttgcagatttggccctgacctaaggaagggcagagccagccgacacccacagctcctggaaggcagtctgcggcctcccccgtgggggcacagtggctctgaagcctttcagcaggtgctgccactcccggccaggagagagcccgcctgggcgggggcttgaactcatggccaccaaaatccttcagtgctgaattttagcgtagataaacctgctcactagaaagataaacattcatgggcaactaacgacacattctaatattctgttatttgaacatctggtagtcagccaagccactgcttcccctaaccaagtgtctgcctgctgaccacagaaacgccagtgtcccccgcccagccgtggggtggaggccgccctgacccccgccctcccttctccacaggctgcgtcatcaccatctcgggacgcatgaccttcacgagcaataagtccatggagatcgaggtgttggtggacgccgaccctgttgtggacagctctcagaagcgctaccgggccgccagtgccttcttcacctacgtgtcgctgagccaggaaggcaggtcgctgcctgtgccccagctggtggtgagtgcgcatccttggaacggcggcccctccctgccaggcagccctagggtccctgtgtttgggcctccagggggaatctgtgcctgcatgagtcctgtcctgtcagtaggggtcagagtagggctgggcctggccactgccgtgaccggtgacctcgggctgcggggctgatccggtgaggccttgagaaggaacgcttcataaccagcgggtaggcctttgggctgtactcccagggcccgtggggtggggctgggcagacaggacaagagagacagacccctttaagagcgccttagcatggctgctgcctgggcgtccaggtcgcctctgagtgtggcgccttggtgttccctggcattgtgtaagaatgctggagggggatgaggaccgygccctgggtcccccatcctctgctgaagggcctgctgggaagctggaggggtgggctccctccaggtggtcctggcctgcaggtcctgcctgatgagaccaagccaggctggtgggctctgggctgagggtcccagccccttggcctttctcctcctcatgcagggcaggtggggtgggcgtgtgcaggccacaygcactcgttcacaggggctgctgcccccaggtgtccacatcccctgagctctgccacgtttgagagctggtggttctccgcctggcatggactctgtagggtcacagacatcgacagggttcgcgcggcccaaagaggcagcttccctgtctctgtcataagaacagaggttccccatcctggctgaccccaggggctctgcagcctttggggtggtcctgatttctctttgaaccagctcttgtgtctgtcactgaggggagcaagaggaaagcagagctgtaggagcttcctgcccctccggggagcgaggatgcgggaacagagcagctgggagcaggcgggtgcccgcaggcctcttgggagctggcgttctcatggaagtggccaggcaggcaccacggccctgcgaggctgacccctgattccagaggttctcgaggcccctgcccccgcggcgtctgctccccacgcagatccgcaagcatttgctgctcagcctcccggagaggagcgtgcactgaaatctctggggcgaacatgcactgaaaacccattcctctcagagcctggagcacggcctgtcgcttccccacatggctgaggagggccgccgagtcgccccagctgctttgtttcccagtcgaggctgaggcccctccaagcccctctcccagccctgccccttcctggagtggaggagctcatgcctcaccagggcccgtggtggtagcgccaggtgtggtgtgtgagctgtcaggcccagcgagtaccctccgctgccaactccaggccagctcttcgctggagttgggtgccggcctctcccaggtcgggtgggctgagtagaggagctgatggtgaacctggacttgatgnatgaggaggactcggccaggctgaaaggaaggaaagtgagtggtgggtgcccccagcacggcactaacacaatgcctgtgacccacccttgcatgactctcgtgaccaggcccctctttgacttggggcttacgaggcatgctccccttctggtgcgaggactgctccatgccttcagccccacagcctcttctgtggcaaagtaccctaggctgccaccctcctgccccatcagggctggctctgctgcctgctccttcctccctcatctgcccccacccctccccatttacttgtaagcctacccgccttgccctggcccaccgtgccacccatcggcccttggcaggatggtgtcctccctccacgtcgcctgggctggtccgcagtcgttcctcagcccctgaccctgctatgaggctccagcctcctctgtccttgaccttcagccctgtgtctggttctcctttcaccttggacacgccttctccaaacttgcctgcttttctcggccatgaagtatgggctccactcccacctgggcccgctctggtctctccccatggacccgacgcccctcccatgacgcttttcagcgtggctgctgtctgtcctgatgctgaatcccccacctgacccaggcacatttccgaagctctctccttccccgccccctacctcttcctgcctcctggacaaactttcccagttctgtcttccctctgcgggcagcatggacagacgcaaggacacgccctgtctgctgtccgctccctgtctgtagcacagctgaccaggccctcagtgaagcctgcgctccctggatgggggaccctgtagtgtctgtagggatactccagcctccccggccaccacacggtccccgaacccttggctttgacatgtcctaacctgtggcccttctctcctggggtggtcagatccatggtctgtgcctcgagcatcgcctgtgtgttgtattgactcccaaattgacttggccagtgctgcccctcaacagggttcccaaaagcatcacaaatacagtttgtcctgaatggaactcattatcacacccgcaaaaaaatccctctccgcctctgtgctgctctggaagtctgggaacccagctggctcctccctactccccccatgcccacgcccacccagtgccgctccactcctctcccgaacagctcttactgccccgtccccatggggccccygctcagtcctcagctgctccttcctctgttcctggtgctctcaatgtgacccttccctgcagcccaggaaactggtcatcaaaatccgagttgctccctctcccaccgaaatgcacggtggctcctccatgccctgggtgtgggtgcagcaagctcactcctgcccggcgcctgtgcacctgctgctcccatctggaccaccctccccagagcctcctggagctacagcacttctcagacgttttttccttagaagggcacccacaaccgctctagagaagcgtcgcctccgccaccccagaccccctcccaaccaccccccsccactgcagacgctgcgtggactgtcaggctcacatatccaggagcaggcgcctggctgcccgggtcagccagagctctaaacttactagctgtgtggccttaggcacgcactttctatgtgcctcggtttcctcatctgtacggtggtgatggacacggtgcccaccatgtggggtgggtgaagatggggggccttcatcatctgctgctgttcacctgctctccctggggcctcacaccctctcagagggaggagtaaacaaacagtgaagatagaggaagttgaatggtgtccagggtcacgaagaagacagcagggaatgaggggatcggagtgtgccgggggacaggtacaattttaaatatgttccttcccaaggaaagcctcagcggaggcctggagtcagggaggaagggcaggagctgtcttgtggggaccattcaggtgaagggaacggcgagggccaaaggcgcagagccactgtctgtaacgggggagcttggggacagtgacacacccgaggccacccggctaggacggggcagggctggggagagagggctggtgggagtctatggggctcacgcatatgggcgtaaagtagaggaggatctgggtgacctgtgctttgaacaggcttcagtgcaggttgatggggtgccctggggcatctcccaatagcagcccttcaaagctgatagtggggggcatcctcccaggttggcagcggctgcaggcgtggttggtgtttgcccaccaatgacggttccctctcccggctgcccccagctgggctgtgcacactggttgtggggtcaggaccactgcacctaccccagcactcagctggttcagggagaccagtgcagtgaccacraggggccagcgatccatgggctctcagggaggggacctctgtgcctcacgttccccactccctatagagtccaacctgagggggtccacccttgtgtggatagcagcctgcggtcacggaggcttttggggccgcgcctgtgaccttcccagagccagctggggagcagtcctggggccgccccttccagaactccataccctgggggggggtggtcagagtgcaggaggagggccagccctgggggaaggggctgcagaggggcagggaagggcgccagcktgaatggagggaatggcagcccatcccctgggtgtggccgcgtcatgttgatctacgctgttatttctcactcattaaagatggtctttgattcttcactgaggtgtcctggggcccatggatgtcaatgttgatgttgatagaaatagccactggcggggcaggctgcccggagagggattttcagctctcacttggggactgcccacatgagcacgagttctgggctgggagcacgtgtgtgctccgtgcggtgaacctgcatgtgcgttccgtccctccagatgtgccctggcggcccctcctccyactcccagtcgcctccctcatccccacgtcagctttcttcagcctcctgtctatttttagctcccttccccagggcctggctgacacrgatgcagcctctctgcttggagttgcrtctccatgaatattttatgctgggggctgccgcacccgctccgggcagctgccagcacttccyggtctcggtctcgtattagaagaggccaactcagcgcgtagaggcaggcctccccgtggcagtgccctctgaccttgggccgaagggggctggagaagtggcttgtggggagggacagcaggacgcaggcggcagcagacagatgtgggaaggcttttcagcctgcaggagggtcagagccgtgtgtctgctgaagcggaggacgtccctggcacctcaggtgggggctgtacttgcctctgattcttgcaggcgtgggcattgtagcctctacaggcccagggagttggggctgagaacttgtgggtcccagcctgggcctgaggaggaggtgtagacagggcggggtgaggggctcgcygaggcccctgaccagggagaagcctgtagcctgttccatggctgtcagggctgagtgagcgccgtgaccccactgcttcctgggcacactggggaggggatgtgtccccagattagccgaggctccaactgtgcaaccacattatgcagggcagggtctttgcaaagcaggcttccaaactggagggagcccatcccagagggtctctctggtgctcatgaacacacatctcccgaggtggccagcccaggactccgagcttcagtctttagccaccgaaatgttttctggatggaagtgggaggcagtaatgaaggcaggtgcggccatctttttttttttttttttttttttttgagacggagcctcactctgtcgcccaacctggagtgcaatggctggatctcggctcactgcaaccgctgcctcccgggttcaaacgattctcckgcctcagcctcccgagtagctgggattacaggcgcatgccaccattccttattaatttttgtatttttagtagaaatggggtttcaccatgttggccaggctggtctcgtgatccacctgcctcggcctcccaaagtgctaggattacaggcgtgagctaccgcgcctggcctagctgtggccatctttaccttgcctttcagagctgcctcatgcatagccaggggagttccaagaactcagggaaaacgcaccctgttgagctttgtccgctctgacgtgccccgacctagaagaggccctgagacccttgggctccttcaggttgagggagccctaccaggccgggggccattctcagcaggtttgttttctggttaggaagccagggcagctggatgcrgaggctgctgcctgtctcctgggtgggcaagggactggaggggcaggggaggcttcctcttgggtggtgcctgggtacaggtcattgaagccggaggcttcagggaacgccaacccctctgcgagctggtgtgtctgctcacagatgcttcccatccccagacaggaggcgggcaccaggcagggagtcactcgccaggggtcgcacggccagcaggcccatctgtgacttcactgactgggaaagggggccgctcactgctgtcatcgatgccactgtgctttctcccagccaggccctactgtggggtcctgggaggagccctgcctgagaacccttctgtgcaagaacctaaaccctgggagtcccaacgcgctgcccacctgcactgcgccgcccacccacaccgcgctcagcccagggcctttgcttcagccccagatgatctcaggaccagtgctgggcaggtgactgaacctccacaggccactgtggagtgtgggggttggggcacattttagtggaaagttttccactccagtttgattcttttgcctctgctggggccttatgtgaggcgtggcctcagcacagacccacacaactttcagaaggctctggaacatggtgcccacctcgcttctgctgctgccctatgacctccttctcctggcctcagctggttcacctgcatgagtgcaggggccgggtaagccccgcgccagccgagaggacagcgtggcatgggctggagcgtccggaaggagggcactgtttgacctgctgttcagctggaggggcgggatgggccccagggcttaagtcagctgaaaggccctctgcagccttctggaagttgtctgccatgcagtgctgagggccacagctttgtgacgcactgatgtgggggctgcagacagagcaggctggagatgcctcttggctgtggctgtcttgagccgtcgccaggctgttaccccaagttccctctccgtgccttctcagtgatgctgtaattggaaggtccctcgcccctttgcacttaggaggaagcatggggcaagctttccatgatggtgcctgctgctccccacccccaggacctgcctgacccccaggcacggtgtgcagaggggcctggggtcctcgcatgggccccgttcctctcgaagaagcctcaggagcagaggtggccattcctgaccgtgtccaggccggaccaggacaagaagagaggtccggtcccaggatgtaggacagagaaagaggtccccacgtggggcctttgtcacggggcagggccctagggtctctgctgcctcgacatcctagacaccccgttgccacaggctcctgctggcagggaggggccgcacctactcccagagaatttcactagcaaaagagtgggcggaagcactgtgtggtggccgcgcgcagcctctgcactcgccctggratgggcaccgctgcgcccgtgtgcgggctcttacactggcttcctttgtttgtttggccaagattggacttttggaataattttttaattgttgactaatttaggaaattcagctgttactggagtgcagaaggttgacggtgtgttcctggaagggcttggtgaaccgcctgccgcgtttggccattagtgasggaagccctgcccccctcctgcccccaccttgctgccagcccacaggcgtgagtcatggactggaatattcatgaggctcagaatccagtgtcgtgctctctgttccttttgcctgcatttagcgggagtcagtcttgtgatgggaaaatacctgcatcctgaagctgcccctgtcgcctcattggttagcgcttaggaacatccggtggccagtgagtcccatgtgcctagaacccgagcatgggtgctgagaaggaggttggcgcagatgagagcatgtagccctcccctccagcctggctctcgccttccctctgcctgagcccagactctttctccagccacctttcatgtttctgctctgcatatatctctgaaagatccactgtgtccagacagccacacactggcccttctgagcggcactggtaggtagctcttctgatgccactgtggcctaaccggctgcggggggttaaaaacccacctgggcacagtgagctgctcatgttctccccctggaggtttacagaaggctctgctcagagccaggcctggggggcatacaacagagtgtgggatggagccttggggcctctctgtccccactgctgtcagatttgtgacacggacagagtgagcactgccaggaggggggctgtaccaggagaggcccgtgggtgggatttccagaggattcagtgaaccgagggagcrtcccggctagacccagggtgctgcggaaggtgagcgagagatctgtcagggaggcctggaaaggttgttgggcccatgtgaggtcctggccatgggacttggagtttttcagcagggcgagttcatgcctggagtatcctggggctggaggccgcccacttggctcggcgctctcagcaaggggtgtggagtgtcctggcaaaggctctttgcggccagacacacatcttgagccctgcragcaaaggtgcaggaagaaacaggccctgtgccccacacggtggtagaaaggatgcagagccctccccacctgtgtgtgcaggatcagaagcaagtccccagcatggccacagagctggcccatctccagggggatggccaagcctaggtgtgctggacactctcatctcatctttgtcactgttgcaggctcctgttcagaccctccatggtctgagccccctggaattgattggggacagatgatgccagtgttcattgagcagaagtactggttttgaattgttaacataaagaccatccctatttagaattaagcctttttgatcttcatttgtttgatcattcattcattcattcattcatccatccagcaaacacctcctgtgcccctgctatgtccaggcatggtgctggcctccagcaggacaggaagggctccacagggcatagcacagagtgggcacacgcacagcagaggtgtgccatgagcacgcggcttctggcccaggcctagcccacagtgggcactcagcaggtgacagctatgatcattattggtgttgtagggtggggaccgccatgtccacactccggcacaagagctgtgagccgagcgtcccgggaccacggcactccgtgcctgcaggaggggctcctgagaggccaccacccaggcccaagtcccaatgccttttctcccctttgtggtgacgatctccctgcctccgccagcagcctcccgttggcctttacgcctcctttcttggccccacttgggggcagttctttcggagtctgagccggtgctgctgggtgaggggagcccctggtgagggtgtttatgactctccacaatgatctcattatttgagacttccggctgctttctgctggaggctggtgcagtcctgggtgggtgtggaggaggaggtaattaacccaggcctgcagctgctgggagaggccacagcggatggcggagaggccacagcggatggcggacaggctccgctaaggcaaggtcctcaggtggagcaagaccctgggggcacaggtgcttgtgaggctggtggtcctggtgctaagctcatcattgctggcttctccatgcacaaggcccctcgcccggccgtgctgagtgtcctcaataatgagatgttttcattgcttttgtgattatcccaagacccctcttgtctcctgttataacagggagagggcatgctacgtggcttcctaattaagaaggtctgtgtccctcaggcttacaggaagttgttatatcaccactggaaaccctttttacgccattcattaattacaaaaaggacaagctattgattttaccgagggtggaacttagtcactcgtcctccataccatgttccaaatgtgtgttctccaagcacagaaaatgcaaagtggaaaacatttggtttgcagcacttggctctgaaagccacaggcttcccctccagtggaagagagcccagaagacagcagtggcaggaagcactaagtggagggaggaaaaagatgcagaccccaggcccaggcagccactaggctgcaggggagccaggggcttggtgctgagtgccaggcggtgctccctgagcaccagggagggagcgtactgtcaacctgctaccttgggaccctccccacccctgcgtccccatgtgtgggtgtgacatcctaaagggcccgctgcgttaaggtgaccccgggccatctggccctcctttggggcagccacacaccagcaggacagtccttggagcagttcccaggctgcacttggcctcaggtatttctgaggacagcaggaccaccacacagacacacacacatgcaccagggaccgcagacacatgtgcacacacacgtaggagctcacgtgcaccggcaccataggaagcactttgccatgtcactttgttgagttcctgtttccaggtgaacaaacctggccctgggccacacagctgggcccgtgggactcagagtcctgctcctggccatgctgccccatcccttccatcaggcaggtgcccgggatacatgggggtcatgtgccctgagctgccctttgccacctcatcctttctctctggcatattcttggggagccccagaggctcggaggagcctgcctgaggccacargtgggtgcccggcagctggcaccactggccagtgccccagaggctccagtccttcccccaccagcagcctcggggacttgagagagacatctgtcttcccgcagagcgttctttcgtcctccacccacccccaaccctccattaaaaacagcaacagccaacagcgtatgcatttatttactttgctgggtggagggagatggctgcgaggaggcagcagccgggccgtgggtggggccttgtgctggagacatctgtcttgctctgtcagcttctcacccagcgggacagggtggcccctttgtcacttgggtaggagaactatttagcaaagccatgacstggggaggctggctgcccaccagcagtgagcccgtaacctaccatgggacagacaccgccccgcggccctttgttccacctccccctgggtggtgagcctgggtcctcaggcacctgggacatccctgcccttgactgccrtcttcataaaccttcaccctggaagrgcgcccctgggcactcagggaggaaggccgcccrcaccttgggagggcagcgcttatgggcgggcactccacgcagtgacgttgaggctcctgggctggtctggactctgtctcagagcctggaacatccagcagatactaccatcccgggagacgggaagagcagtggggccctcacaggctctcaggctcccacacatccatccatcatcagacagcatttgctttgtctgagggcagagcctggctgatgagtttgctgcaaatattaaagagcagggccacatcagagccgccttggggcccgttgctgggcaccagattctccctcagcctggagccgaccctgagaatgacctgcacctgggctcgtgcccgcctcaggctgtgtattaactgacctcgagagaagcagtcacagccctcggcctgtggcattgggaatgctcgatggcctggtggccgctggggtgggagcagctgtagtggtttgggataatatggctgagggcagggcagggcccccgcctgggggaggccaagctcagcaagtgctcctaggctgtgccgagggccggggtgaggtgaggggaggcagggaagcccctgaccctggttcatcgtggacacgctgcaggtccatcgccttcctcacttcccatggacgagtcccacccctaaaagtccctcggcataggacgacctggagggcagcccccatgcccaggtttaaatggaggctctccccttacccgctgtgtcactttgggcaagttactcagcctgtctgtgcttcacttcctcattggtaaaagtggacaatcatttctgtgctgcttggtggggttgttgggaagaccctgatgtgcacagcctgccgcgccctaagcatgggttgcgcagggaatatccccttatcgctgtagtccctgccccacgtgcacagcccatgtgggggcaaaggggtgggagggctctcgtctgcagtgccttctgcagacccagagttgggtggtcctcccacgccctcggcggctggagggctgtggtcacatctctggtaaagatgccgagagctgtaggaagttactcctattccactcccaggtggtcatggaggccagatcgttaggggactcgagggctccgctccactgctgcgtgtggctggcagaggtgaggaccgggctgtatgaagccctggaggttttctcgctcttgggcggagatctccctgccgttcgggccgtgccgcgtgcgtggggcctggggcccatcacacacctatgaactggaccagaaggagcatggtcctgagttagctcttagcgcctcttggcggggagtggggaaaatcgcgcctgtgcacagcccagacggctccctcagctctgcccgcagcccaccgcttgtaaagccaagtccccgtctctttggggcctggagatcattggtgcctagggaagaaaggaggggctggttttcctagatctaggtctagttagytttttgcttttctagctttttaattatagaaaaggtcaaatatacgcaaaagtaaagagaagaaagaattcctgtgtagttattagctcagggccagtcttatgcgttgacagccctgactactcccccaccacagagagctctcaactgtggaggttttctcttttaacagctttactgagatgtaattacatgccgttctgttcacccacttccaggatacgattcagcaggttttcttctattcacagaggtggacatcccccgccacagtctatttcaaaaccttttatctcaccaaaaagaagcaccaccccttagccaccactggtcccccagccccaggcaaccgccaatccactttctgcctctgtgtatatgtctctcctggacatctcgtgtaaatgggtgataggcagaccctgtgaccggcttctttcactgtgttgtttttaatgcctggttgaacatgggctgcagggagaaatttggtccccgcaactctgctgtgaggtggacattggcccattttacaaaagaggagtcgatgtgagtcagtggtgaatcaggattcacacccggctccagggttgaagatgctgggctggtttccaggcggaatgaagagaccatcccaggaagggcacacagcatggttgggtcccaaggtgggcaagcctctgcctgaagcagcccatcccagaggcggggcagagcttggttccttatgaaagggatccctggccagctcagtttgagaaaggcgaaagttaaacagatttgagacgtttcagaaccttcatcccagtgtgcattgtttattgtaagaggccatttagtgcatagatccccaaacctgcctggtacagaccatcagagaggcatcatctcccagtggagttggggagggagcccagaggatctgcagacacagacaggcaggcaggcaggcaggcaggcatctcctgacctggcagcccttcctcagcccctctccagggccctggccttggacgggccattcccaccagccccccaggacacccatggtaacagctcctaagctggtggcgttggctccgcagagccatttgccacctctcttggcccctcctggtcctctggtacctgagagcatgtggctggggactcaggcacttggggaccaagtttctcgccagtctcccacatctgcacattcccaggaagttgcctctcctcaggccggacctggctcctgtgggctgggtgggggcttcagctgtgtcccttctcactccagctgcctttcctgggccaggctcgctctctcctgctttcaaggattctttttctttccaagctccttgccgtctttcctctctgtggagggcagatactccaccagctagagggaggacccgagccgaggggccaggctttcagactgggaggcgcctgagtgcgatccagcctgcccgtccccagctctcctgctcccaacccgatgtctcccagggctgccacagccactccaaagccagcagaacccagtaccaaccccaccaggtcctgttgccttgtcgcccagctctgggaccccatgcccaccctacagctcttgctctgcctgctacagggtcttcaaggtaggcaggaagccaggctgtgggcggccgctcctctgctgagcctcggccttgccgctgcaggcagacaagaagctgcagcttccctccacatcaccaagcaattccacaggggaaggggaggacaaggcccctatatcccatcctggtggctttgaccttgcattcttggccacttcagatgtgccccatttggggcagcggcagatggaaagggggcagggccctgctacacagatgtggtccgcgggccacagcgttgtgtcacctgggatcctgttagaagtgagtctcagctcccagacccactggatcagaatctgcatttacaagactggcagatgactcagatgcacttaaaagttcaagaagccctgatctagcacattctgcctcagtgtgcacagaggtcttcagctgtgcccagcaggatgtagccatgtatgtcttcaggggagcttgtcatctgcaggggctgcgctctgtgccctccaagcccaggaagctcaggggtcttgcccactgagaagtgctgctggaactgagaaagaacatttcattttccctggactgtttcaggtcaaattgcatagcctcaaattttatttttaaaagtcagccagagatcaaaycgtagcagcgggagggacttcttcaataaagtgtyttggaaaagcagttttcctgtgtacaccgaagactcttcaaagggggaccaggaccgctgcaaggagcgccacctatttctttaaatacccgaagattccattggctccaggccggcgaggttttgacagtttacacctggtgacatttagagactgattttggagagagctgaggggaggaggcatttggtataacttgacattacatcctctggctgactgcgctctctcttgccaatataccatttgtctatgaaacacttaggcccaaaaatagctgtacagtttggtgtcattgtggatgaaatgaagggcaactgccccatctctttggctttcagacaccctcaaaatgttgcgatgaaatgtcccagaggaattagcacagctcattaaacctgaattcccagccagggtggggccagtcagaacatggcgttgggacagatgggacatcagaagtgaccacctaatactccaggggtggcacctgcccaggggccacaagacttagagtgaaagggggtgccgttcataatcgcagcccgtcgacaggcatgaaccaggaccgtcctgggcagaaccccgtcttgggccaaatcccacctgttcagttggctctgcccccagaccaatgagatggggtccctggggtccaaggtgccgcctcctgagtgtacggtccagagcgtggtgacagggctccctcccaacaaagcaggcctattgctcccagtacggggcggggccttctcaaggccataggcagcacagcatctgcccacttctcgctggggcaatggccgtgtgcagctggctttccccacttctctccggggcggtgaccgtgtgcagctggctttccccacgtctctctggggcggtgaccgtgtgcagctggctttccccacttctctgcrgggtggtgactgtgtgcagctttcctgggagtgcagcgaatgcagggtccctcttcctttccacttccgttcagctcccatgtttcattatcaagtgcattttccaccgaagtccagtagcaaacaggccctgggcttggaggtcacctgctgtgaaaggtggtgagaggatgtcacagggctcggcacttcactgactgcttctgacccgccatgcccttagtgtctcctctatggagctctgccacctgtggctcctgcggcccctcaaagcatcttggctgaacatacccagcccagtcaataggcccatcagcgaggtgggacatgagccccatgcctgggctacccggcagtcccaggaggccagcggggccgaggcgtggtactcagcatgcaccaggggtggggcagatcccacgggtggggggcagggccccaggccaggtcacaaggccacggcactggttctgcagtgaccctaacctgcctgtctctgtgtgtggtccacagcccgagayygaggacgagaagaagcgctttgaggaaggcaaagggcggtacctgcagatgaaggcgaagcgacagggccacgcggagcctcagccctagactccctcctcctgccactggtgcctcgagtagccatggcaacgggcccagtgtccagtcacttagaagttccccccttggccaaaaacccaattcacattgagagctggtgttgtctgaagttttcgtatcacagtgttaacctgtactctctcctgcaaacctacacaccaaagctttatttatatcattccagtatcaatgctacacagtgttgtcccgagcgccgggaggcgttgggcagaaaccctcgggaatgcttccgagcacgctgtagggtatgggaagaacccagcmccactaataaagctgctgcttggctggacccacgtgtcctgggtggtcatttgtcttgggggggctgctttcccagggggtgtgggacattggggctcccgtggacagtctcagccctcccagcaccagcacctgcatgtaccctagaacctcaggcacagccacaccgattggtgtccggctggtgacttgctggctatgaatgcccatttcccgtgggtccctggtttggtgtcctggccccagacaccctggctccctggacctcataggcagcccagatgctgggaggatgtgggctcagggccacgctgcctggtgggagtgccagcaccccacaacccccctgtctggcttgcagaggatgccggctctgagcctgtgtggctttcctatgaacagggtggggctgctgggaaagactcagcgaggtgatggtgtgggaagagccaaatgtggcctggctcagcgtgtgggagccccaccctgacccagcctcttgctagaaactgcctagacaccccaaaatcctgtctgaaggagccccccagctggcgccaggactctgtgcctgacgtggaaactcccccagccactcaggcaggagtctgctgggatggcttatagggcaggggtctgagggacagcacgaatgtgtgtcagtgccgttggtgtgaagctgtgggcatacgtgtcactgacatatctgtgcatgtgcgtgtgcatctgtctgcatatctgtgagcacgtgtgtggtgagggtatcggtgtagcagggttgatctgtgcatctggcccagccaaggccactacagggaccaggaccccacctgcatccatggctgaaaaggaggccctccaatcaagcacacccagaagtggcatctgggagaatgttcccaattcagtctgtccctgaagccccaacatctgtcctgccgcctggagaagactggcccgtcaacagctgcggcctcgcacaaggctccctctggcccctggagagcgaggactcggctccagatgtgcagaaacaccagccaagagcttgggaatctgtcccgggccccagtcacggctgacggggttatttcctgtctgggagggggttggaggtgggagggacaagctcagccacatgaagcttctgccacgccaccatgccccttggccccccggggctggcctcagccagcctcggcccccagctccacccatgacccatgccagaatggtgccctgggttcagagcaatgaggaggccacccttcccagctagcagaaggcccagggctggccacagcagtgcctgagcccaggggctcactgaggggaccagttccccaaagcacccacacccttcacttgaagttgggccccgcatcagactccctagttcagtcctggctcagccactcatccgcgtggctttgggcaaaccaggcacctgaaaaccgcctcccaggggcaccgggcactttgcagcagaacccagcacagcacgaaataagccagggccccggggcggccatcagaggccatctcccacctgccctagagccagctgaggccgggcagaggcactggtccaggcagtgggtcagctgggctggcagaggggagccaggcccagacagaggcatggctctccatggctgtgtgtgcaatcttaaccgtggtgtttctaagcggcatggctctcggtggccatgtaattaagtgtggcgtttctaccgtttcaccccgagtcacaggcgagacacttagaaacaccacccttgattacagctgccctgtgccagcctcccactgctggtggcctatttataaccaggaccacctggagggggagccaacctgtccacagagggctcactggggacactgagggccctggctgcccgagaaaccacagggagtataggtgtgcatggccccagattcccccttgctcagccccacacgttattgcggggcctttctctacagacactcctctttttgtctcatgggacggaccctaagacccatcctgggccccctaaaagctgctcagggacctggggtgtggggacggtttaggcaggtgcaggctgtggagcagccctgcccggactgggcaagctccaagcatccgttttggctgcaattggtttgggtctcctcctggtcgggtgcctagtttcctccagacacaggggtgcctagtcatggatgtgtcccagaggcacggaaggacactatgccaggcagccccagaggccttgtgcccattgtgtgtgtggtcaggtgctttctagaaaagacaggcacgatcctcaggaggcgtcctctccagggcccccatcaagaagcaggaggctttccgcctgcatggggccagctgaggctgtcagtctgtgggtgacagcctgtgctctatgaggagtggtgatagcatgagggcttgggagggaggggcggaggggcgggaagaatgggaggaggggaggaggggagtaggagaaggcttcaggcgctgggctgcagaccctggcctctcccggctgggcggtggtgctcagagtttcagagagaacaatttctgagcctgtgggggtggcggggaccactcggcagcccggtggcccgtgcactttattccctcagtggaccccccaggcccggggagcagcgtgaatccgtaactggcccaaccttgcccctcgctgcccctgcttcagactggattcccggttcctagaagccgctggccatgcgtcccttgtcctctccacgccccgccccgattgttcatcttagatgcggcttcctccaggaaggtctccctgagccccagccctggccccaggttctcagtgtccattcctgccccagctccctctggcccccgggcccccagagctccgggcctgggtcttgccccggcgtccgaaggcggcgtccggagtgtgcaccgagccgagctgggagccaggggcgcggcgctgtcaggaggcgccaccagcccagggaggctcgggccggccgcgggcggacgcggggacacgggtgggctgcgtacggacggactgacggaaggacggacgggctgacagaccgacagacggccgcgcctctgagcgggcgggggcggggcgggccgaggggcggtgcggaggccccggcggagacatgcgccctgctccgccccccgcccccggccgcccggcgcagcagcggagcggcgggagctgagcgaagcgcggcggcggcggcggcgcctaggggagggaggggcggcggggccgagcccacctagcggagcgcgccggccgccggtggccgccgccagcatgccccggcccgcgggccgctccgccgccagccacccccgcggccctcggcggcctgcgctcggcccgggggcgcgggaaccgcagccggagccggaggcgggagcagcgagccggagccccgggcgctcgaatgcagggtgagcgtcgccgccctggcccgagggcggacggacgggaggaccccggcgggaggactcggcgggaagggagggggctttccgcgccctatcggtcgcggggtccgtccgagggcccacgagcggcgcttagcgctggcacccccccaacttggggaccttcggggtaacttccctggggccagcccctccctccgtccccctgcatcggggcctagcagcgccgccccctgggcttctcaggggacgggggcggggcgcggtctggggatcctgagcccgcccctgctcggcgcaacccggaggggtccgggggccgcagtcccgccaggtttcccagcctgtcgctcggacgcgccctcggggtggggcaggactcggggcacccactggggaccagcaggcgagagcacgcgagtcggagcggggattgcagggcggggggggtgggatcggagccccagggggttgggactgtaggggcgggggctggggggggcgtgccggagatgtccaggcctcgcgctgcgcgtccctccctgggcgacggccaggccgggccccgtggaacagatcggctgcagcgcgggcggagaccggcgtgggggcggaagccggggcgcagccagagcccggggaatcctttcaagttctgggttctctttgttgcgcaatggggcctcggggccgcgcggcctcattggcccggagctgtgacgtcacgccccggccccgcccgcatgtcttgcggagggaggcctcatggcccgggtgggtcccaggctagttgcacctgcagttggccctgcagtgggcggggaagtgggaagcccggtcctgagatgctgcggaatgctttaagtgccctgcaggagaaacttcccagcagaagacagggctttaagtgccctgcaggagacacttcccagcaggagactgggtcccgtcggcactgtggggagcccagcctggggtctggccctagtggccgctccattctatgaagaatgaacagaaagggtgcaatccgtggatctgtggtcactgacccagagccagagggacactttgttcccacacaaccagtcctctgtcactctgcacttggaacccggtgtccacgccctgtcccccaggacgttcctctcccatgccaagactacagtgcccaggagtgcctggccccaaacccagccctgacactattctctccgtgttgccctgagcttctgcctgaagtgttcccatctgcagtgtggggacggtgagacctgccctgcagacctgaggctcagaaagacctcagctctagggacaaaaaaaaaaaaaatgcccttttccccaacattttagggtttgagaggccaggactttggtgtcaggcaagtggagtttggatcctggctcaggcaagtgctggccgggcaaacagctttacctctccctgcttctgctggacaaactttacaatggggatgaattgtgggggcactcactggaggagcatgcccgtgtgcaagaggatgcacgtgcccctgcccacagacctagagcctttttctttttaagacagggtctcactctgttgctcaggctagagtgcagtggcacaatcatggctcactgtatccttgacctccccaggctcaggtgatcctcacacctcagccttccaagtagctgggactataggctcacaccactacgcctggccaatttttttatttgttgtacagatgggttttccccatgttgcccaagctggtctcgaactcccgggctcaagccatccactcaccttggcctccccgagtgctaggattacaggcatgagccactgcaccctgccttcagacctaaagcctttcccagcagtaatgcagcattaggctagacgagaggaagaactggcaccgcgaagggctgggctggttgcagcctgtggctctttccttaccaccctgcaccagtaatcaacacatggacagggtgggcggggccaaggtcacggggctagacagagcttgttcacggggctagacagagcttgttgggcatctgagggaaggcctcccagtctcacagccgaggctgccttgggcaggtagaaatagatgctgacctgctaggtgcatgctgagtccactttcctatttgagagcgtaaagaccactggtgtctgcagccctcttgctcacagcgcttactcacactctgtctgctctgaacccccaaaaggctgccaggcaccccaaaggctggaggtggcccagtgctcccctcactcctgaggctagtctgccccaggtcctggtcccagtgaatatgtatctgcccacaggtctgaggctccccggcacctccaagctcagtgtcttggcccataagagacagcacaaggctgggcgcggtggctcatgcctgtaatcccagcacttcgggaggccgaagcgggtggatcacctgaggtcaggagttcgagaccagcctggccaacatgatgaaacctcgtctctactaaaaatacaaaaaaatagctgggcgtggtggcgggcacctgtaatcccagctacttgggaggctgaggcaggagaattgtttgaacccaggaggcggaggttgcagtgagccgagatccaccctgggtaataagagtaaaactccatctcaaaaaaaaagaaagaactctggacaagacaagcaggaggcttgccagctgctggctggggcatcgctgccttccctgcccgagagccaggggccttggctaaggcggcagtggccccccaccttgagctggagatacttcctctctgggagacatggggc

SEQ ID NO: 95079 - DNA, 87053 bp, Homo sapiens
  misc_feature (1)...(87053): n = A,T,C or G
gaaactgtgctccttcagtgttgctgccataaaggggtttggggaatcgattgtaaaagtcccaggttctaaattaactaaatgtgtacagaaatgaacgtgtaagtaatgtttctacaggtctttgcaacaaactgtcactttcgtctccagcagagggagctgtaggaatagtgcttccagatgtggtctcccgtgtggggcccagcaatgggggcccctgatgccaagagctctggaggttcttgaaagaggggacacgaaggaggagtgactgggaagcctcccatgccaaggaggtgggaggtgccctggaaatagctgcctcatgccacttaggccatgactggatttaatgtcagtggtgtgccacagtgcagaggctagacaactgaaaggggctaccaaggctgggaaaaaaatgcaattgttgctgtgagtgactttgaaagactctggtgccttgtggtgcccttctgaaattcaaacagtaatgcaaaagtgtctgcattagaatttacggtgtctaaaattcatgtttttaaaagagcttgcctacagatggtttccacacttgaaattgtgccctgcgagttgcatagctggaagttcaatgctcagtcctaccttggctcccattaaacatttggtgctctgtggattgagttgaacgtgttgaggctttgcaatttcacttgtgttaaaggctctggcatttttccatttctatgcaaatttctttgaagcagaattgcttgcatatttcttctctgccgtcacagaaagcagagtttctttcaaacttcactgaggcatcagttgctctttggcaatgtcccttaaccatgattattaactaagtttgtggcttgagtttacaaattctacttgttgcattgatgttcccatgtagtaagtcatttttagtttggttgtgaaaaaaccctgggctgaagttggcatttcagttaaaagaaaaaaagaaactagtcccagatttgaaaacttgtaataaaattgaaactcactggttttctatgtctttttgaactcttgtaatcgagttttgatcatattttctattaaagtggctaacacctggctactcttactgtacgaggctttgttttttttaaggactggcatgtgaagaaaagctttgtcctcacgaattagttgctgtaccaacagttacgttggtctttattaggcttagaagaaaagatgtcctttatttccacttttcttcccttagttgtgctgttttgccgcagtgagattcaggggttggctgtcactgaactctgtgtagaatttctccagatccagagcctggggatcaactttgccagcaaatgccgttttctgatggggaataggtagtgtsaacttgaattccatcacaaccatgacaccagctgcgcccaaagcacactgtagaccagtttcctttgttttgactcacacctcacttgcctgatcgaaaatagttgaggcacaggggctgactggggtcgtggagagtttcaagccgtgatttaagttcataagagtccggaaacaggaggttggtctcgtctcagccaatgccagttacacaacaccttcacgcccttccctcgagtgtgctggtacagctgaggaaatgaggtttgttgatgtcactaagtgctacgaactagtcacttctaaaggcttcatgttttccctccaaaaagcctctgatcccccttttcccatggcacttccagtggtgaagtgtttgggttttgaggactgttgtcctcatacattttcaggagcagccaggtgttgaaatacgtgggtcctaactttgctcatgaatggtgtgtagcacagaggtggtcagaaacacggggaaagtgaggaagttggataataccaagtgtcttaagacagttgatatctggggctatctagagctcagcctttttaggggacacttgatttcctggagggtgataaggaccctggtgatggggaataatggtccggctgttgaagtcattgatgtcaggggagcctggaatttggtgttgacacctgatttcactttccatttgtacatgggactcagacccttaaacttgtcaagtattgtaaaccaagacctcccacaggagagggggacctaggatgtgggacagttacagatctggcagttccaggggacagaccatctccccagtaacccttggacagaatactggggtgacgagtcagaagctgcagggtaggggcaccacggcggtgagagatgggccaggtccctgaaggagagcctgggttggcacctgcccaggttgttcgctgagtcgtggtgatgggcctgtatttagtggaataaactgtggggttgattctctttgagggagaagagggtagaagagaggcttggtgtggggatttgccatccctgcaaggaggtagccctccacctacaggaaggaggtgaggactgcctgttaaacggtgcaatcatagtgcttatctctaggaacaggaaactgaatttctcatccagccattttcttgtctttgggatggatttgagaatacacattcttttttttcccccaggctattttgggcccagctaaaacagtctgtaaaggctgtgctgaccagcggagtgagttagctgccaccatagctagaacccagagaacacccataaaacgttctcaggcttacacaaggattttctcaggttcagggccatggcccagggctgcctttttgagaagctccttcctcccctgcaaccccaactgatttgaattcaggtggtgcagggtccacactttcggaaaaagccttcaagtgcaacgaaagtcttggtgcagcaggtgggcactgagccttcattgcagaggacactgcggtcctgagtgacgccgtttcacccctgccgaggaggaggtgtggggcagagttttgatctatgtgactcgctgtgaggtggtgtatgtacaagcacttcattgcccttgagaagctggtggtgccaggtggccacagcgtggatatgcattgttgaacgaaatggcctcaggcaggccttgggggttcctggatgaggagttcatttagtcctggaatggaaattgagtatggtatgtgcagaagacgatgagctttttccactctgttcttggaaaaagttttttttttttctatttttgagacagtctcgctctgtcacccaggctggagtgcagtggcgcaatcttggctcactgcaacctctgcctcctgggttgaagcgaatctcctgcctcactcgcccgagcagctgggattacaggcgcccgccaccatgcccggctaatttttgtatttttagtagagatggggtttctccatgttggccaggctggtctcgaactcctgacctcaggtgatccatgactgcccgcctcggcatcccaaagttctgggattacaagtgtgagccactgcacccagccgaaaaaagttttttccttgatgcttttgtaaccggtatattaaaaaatattttgattttggaattgtcactgaggtgtaattatgagctctatgatcagcaaacatgagaatcttgtctcctaaaacagtaaccttaatgataggcttgttcttgcaacgcagagttgcaagtttcagggattgcttttaacgtcatgcatttttggtccgttgtcattaaaatacccatttaatagtttaacaataataagggctcacctttaaaaatgactggagagccgggcatggtggctcacgcctgtaatcccagcactttgggaggccgaggcaggcggatcacgaggtcaggagattgagatcatcctggccaacagggtgaaactctgtctctaccaaaatacaaaaaattagccaggtgtggtggtgcgcgcctgtagtcccagctgctactggggaggctgaggcaggggaatcgcttgaacccgggaggcggagatttgcagtgagctgagattgcgccactgcaccccagcctgacgacagacaccatctcaactcccccccttgaaaaaaaaaacccaaaaaacctggagatttgtagtaaaaaaatccatttgtttctagcattccagtttttgtttcattttgcttttggacattaaataatattacctagttgcagtcatcgggaagaacaggatggggagaggattatgactgatgagcatctcggctctaatttgttgccagattaagcagttagaactgttctttcttgaacgatatcttgactttcagcctcgccttgggaattggagccagggttaatgatgggggcggctttctggtgatgagaagtattgtaaatcagagtttttctaccgaagggcaggggacctttgaaagggattagagaggtgttggggggctggtaactgaggggtgggcgtgtcagcttagggctttcttcccttgttggtcaccattcatggaggcagttggtctggaaagaacgaggaagaggcaggtttggttcaagcctcggtgatctggggctccccctggctagctgctctgtggggaaacacggccttgggaggggaggccctttggtttcctggcctgcttccctgaagagtgttcctttccccttgcaggcggccagcactgggctgacccggcttctctatctacagcgtagttaaagcggatctgggagatggaggggttcccaacaccccagtctttggttccagaaggctggaccgacctctccttgcccagggatgaatgcagagggtcttttgtttggggtttgctggcaataaaattgaacgggaagaagggaaactgctgccgatcctgcgtgtctcaggtgggttcccccagtgcccctgcgaggcagtgagagggggccctcccttcacgggccttctggggttagagagctggcggtcggccagcccctggaacttttgcgttcttaaggtagctttaagacttgccgccgcggagactggaggcgctcatttaaaattccagtcttgctcccgagggctttggcctccatcttcacctttaacgaccgagggctggtggcggcggctccttcctgctctgcgacaggtgtcgcttctgagcgggagttttgggcacagacatcgcagatccgcaccacccctaggggtctgcatgggtttcagctgcacccagcctggaggggctttttggaagggggcacgtgggcggtgggagcggggaagcaggtgaggggagcccgcctgcgcggatttttctgctgtaaatcagacccacagtctccagagcgtcttttccccaagtgtggaacacatttttcttctaatcctctttggagagggggttaggaacgtgccgaggccggagccgggagcggggtgggtcccggcgcctgtgaaccgagtgggggagcgggccgcgcgctgccctgaagaccctgcctccgcgcccttgggggctcggggcccagcgccttcgcaggcgagcggcggcggctggctctgcccggggtgcgcgggggcggtgtttcctcgcctccccctgcgcccgggctcgccaagccccgactgcccgctcggccgtcgggtccgcgggcgcgcggacgcctcgacggctccccctgccggggcgccccccggtccccaccctcacccggcggctcaggactagtcccccaacttgttctctgctgttaactagtcgcgctgccggaacgatgggatggggttgccacagcaaccagactggacgtcacaatccgggcatgtgtgccgcccccccgccgtgccgccgtgcctctggcgctgccgccgccaccctcggccggctgcgggactcgggctgcggggcgcggtgggaggagcgcccgggctttgcggggagcaggctaaggcggccgagagaaaggggggtcgagacgggggggtggaggtttgggggggtgggggggcaggcggccgccatcttctcgccgaggccgcctcgcccgccgcgcgcgccggtccggcagcgcacgggttaaggctggcaccgcgcccggcgggagggggggcgcccacctcccctcctccccgcgccgggcatgcggggcccagtgggcaccgaggaggagctgccgcggctgttcgccgaggagatggagaatgaggacgagatgtcaggtgagcggggcgcgggtgcgcctggggccagagcggcgggggcgccgagacgggccgggcccagggcggagcgcgggcggcgggggcggcgcggccgggctggcgcctcgcaggaggggcacccgggttgcggggctgcgctcccgccctgctggcgccgcgcggccaagggcgaaggctgggtgagcgcccgggccggcgtgagggcggctaagggcggggtgcgatccgggccccccgggcggcgacgcgggccaggcgggccagaggaccgcgggccggggcctgcgctggggggcgcggcgctgtcagggtcagcccgcgtgcccttgaagggggcgggaatcgcgctagctcccggagcggcgcaccccgcgctcgcgtcccgccgccgtgcgcctctggcctcgctgcgggcaggcgggacccggcccctggcccatgtcggccgcggggcgggctgggtggggcccagagaggggcgaggaccggcggtgcttggggacgcgttgagcgcccaggatggggcggcttccctcccggcccaggaggactccgctctgggacgcacgggctcggacccctgctcctctttcctggcctctgtgcgctgtgaccgccgctcccaagcactttacccgggccgccggcgtccttctggcgcgacctagcgcccgccgctgtctccagcctcaccatcgcccagggtggtggccgttcccagcccaccctgccttggctacgggcctgacgccccagggccaccgcccctgcccctaccatctctctccttttatctctctcagaatttagtatacacagggctgtgcgccaggggttgccttgcgggacagttctttagttaactgctcaccatttgtttgggacgttttccctcctggcacagctgggtagggccccaccctgtcagccaccctccctcctttctgggagactcttacttctcggcttccctgcgccaagtctgtggcctctctggacttcggagagacttgtgggaggctggaggccctcccgggcccaggaacgtgcatctggccccttctgacttccaggggtgagaagactccacaaatggacacctccagctcctgttggaggaagcagccagcgtcttctggggagggtattcccaccaggtggccacaccccctgcccccttctgtttgcttgcttggttagttggtggctttaatgctgtcactgagctcctacaggagcccggcactcacctcgcctgttagacaggccaagttggcagcgagcgtgctggggacggggaataggggagtcctctcttggggtggagttgcctggacaatagttgactgtcatatcctgggtccttggaattagacccattctccggaggggaactctgaggccccgcacaggcacaaaaaaaaatcagtggccattttccacctaggaggctggctccccagtaagccagtttactggttttctcagcaagttgtttgttatggtgtttggggtgtggcccttttgtgggatcagtggcatttctggggttgcaccgacccgctggtggagtcccctggctgtctttcccatcttacactccggctctctctgactatgtggggacttagaggttggggaggggaagaggccagggaaggtgcccccagtctagtaggcacccgactcactgcttgggccagagaggcggggctctggtcatcctgcccaccacccgtgctccccctcggtgggttggccccagagcctccaggagtgcccccagagccctgcagaagagacgccctgctctggcacctctggcctggggattctgtccccatccatcagcaaggccagctgctccacctccagagcctttccaggctcctggcttctctccatgttctgggtccaagcctctgtcccctcctgccggtcccctccagggccttctacccactccttctgaccacccactgcacagcagctggggtcacctcgtgaacccaagtcagatcccgacccgcatggctccagtcgcctctgaaacccttgtcccgggtccactcctgtacccctttgttcacagcagccacgctggcctccttgctgcttctggaacactccacgctccacgctccatcctgccatggggccctggctgtgacctctgcctgacctgctctttcctctgctcaccgctgcctcctggtcatttaggtcccagctcgaatgttatgatggggagggacacccttgctaagggccttccagtcactctgagacacattgtcatgctttctttggaagagatggggtcttgctgtgttgcccaagctggatttgaactcctgtgctcaagcgatcctcctgcctcaacctccctagtagctgggactacatgcttgtgtcaccacacctcacatactcgaaacgttgtcatcagtttcctcctggatctgtgggttccccttcgaatgtaactctcgataacctgccatgcccagcacctgaaaccatgcgttcctgagagatggttgtggtttcagtgtctgagggctgggactctctaggtcaccccagcttctggctgtgaagacagccctagccaggcctcctgtcaagtcgcactgctggccccccactcaccctgagctcttcctcatagcccctatgcagccctgagtccaagctcagtggcggtgacccccaaagaccagaaccagctggttccaaaagatggaagtttgtggctggaggagctagtgttttggaagctgtcatgatgatttttcagtctacggctattaaactcatgacttgtccgatcttttttctttgactctgctcatctcccacctccccctgggagttgctcactctcagcagtgaattattgtttcccgtgcagtgatggtggggagggggaggtttgccctggccagctctggcattgaggcaggtgtctgagccagcttctaggaggaaggcagggcgggtgcctcttctggttgggggaccagcagttgccagattctcctgggagttggggtggctggttgaagccaggggtcaagagctggtgggatgaggccttggcttctagctctgagcattagctgagtggtcttggacaagccaggcagccctctcctcggtgtgcccacttgtagtatggggacatagcactggctacctcatagagggttattatgaggaacagtgagacagtgcatgtggaacattaggccacagtgcccagcacatgataggtgctcaataaactgtggctggtgtagttagcaccagccaaggagggcagctgtcctgccttctccaaggaaatgcttctgatacttgcatccttagccagtaagctcaggggagtaggagcctgggtgggaggagggctgtgaagcccaaggtaggggtggcaggaagcaggagagggcttcagaaaatgtggctctcagccctcttagggccactgctgggctggcaaattccctgcctcattggcccagcttttcctcaatcacagacaaagctagtgagcccagaatgggcaatgtctggactaggcaccgttacctctctggccccagtgacaattggccctagatgtgtaagtatcttaggcttgcttcctcaggtccaggggccaggagagagtgacagtcatgattcccaaaaggccatgacattttagcctgcacccctacccctgtggaagcatggtttggtaggggggtcccagggagcctgattgtatttaacattcttttctgggaggagggagacaaaatgaccagcacactttgcccagtggcttggccagtgggttattcattgtcattccaagttgatcaggtaataggatccatctatcattttatcagttcattcagtcgctcacccatcatccatccatccatctacctacccacccacatctacccatccacctacaaaaccaaccaagtaaccgttcaccatccgcctatcaatccatatccataccatatccatccatccatctgttcttcctatccactattcatccatgcactattcgtccatgcttcccaccatccatccatccatccatgcatccatgtatccatgtatctacctgctctcccacatctacccgtcgacccacaaaaccaaccaagtaaccattcaccatccacctatctatccatatgtatatccatccgtccgtccgtccatccatccatccatccatccatccatttgttcttgttcttcttatccactattcatccatgcactatctgtccatgcttcccaccattcattcatccatcctccaatccatccatccaccattcattcatctgtccatccaccatccacccatccaccatccatccatctgcccatccaccatccatccatctgcccatccaccattcatgcttccatccattcatccaccacccaccatccatccattcctgtacccaccattcatccatctatccacccgtcatccatccattcatctatccaccatccatccatgcatccatccaccatccatccatgcatccatccaccatccactcatccattcatccaccatccattcatccatccaccatccattcattcatccatccaccatccatccatgcatccatccatccatccacccaccatccatccatcaatccacaatccaaccacgcatccaaccaccatccactcatccattcatccaccactcattcatccacccaccatccgcccaccatccatccatctgccatccatccatccacctattgtccatctattcatcaatccaccatccatccatgcatccatccaccatccactcatccattcatccaccattcatccacccaccatccatccatcatccatccattatccattcagccatccatctgccatccatccatccatccatccatccttcatccaccatccatccatccacccacccaccatccatccttcatccaccatccatccatccacccacccaccatctatccatccatctatccattcatctttcatccatccatccgtcattcatccattcatccatttatccatccgtccatcctccatcttccatccaccattcatccatccacccaccatctatccatcaattcatcatccatccatcaattcaccatctatccacttattcaccatccatccaccatccattcatccatccacccatccaccatccatccttccacccaccgtctatccatcaattcatcatccatccatctattcaccatctatccaccatccattcgtccatccacccatccaccatccatccactatccacccatccaccatccgtccagtgtccatccatctgccatccatccatccatccatccatccacccaccatccatccatctatccatccatctacccaccatctatccatcaattcatcatccatcaatctattcaccatccatccaccatgcattcatccatccacctatccaccatccatccattcactatacaattatccgtccacccatcagagacttctggaatatcttctctgagctgggtactgaacacaatgtgtgttgtctaactttctgggcttttgcttatctctgtggctctgtccttatttcactctccttccctgtctctctctctccctctgtccccatatctgtcagttttcgtctcccctgaggtcatgcccctgcctctccctttctgtctggccgtttttctctcttttgtccctccctgtccccccaggttgacttcccctctcaccattctgtcctcctcctccccacccatgccctgggcctctccctgctttccctgcacccccagggtgactccccccaggccccagtcacttggggtaaatgcctcatctatccccgtctcttccctccactccccactcaggactgatgctttcttttgatgtgacaccaatgaggtgatgtctgggttttgttaaatgtcataaataaattatgaatcctctcttgggcggtgtactgcccccctttrccagcataagccctgtctcatggggggaggttcgaggactaacggcagcctgagaactccttggccagcgtctagggtggccctgagaacctctggcccagcagtggccaaactagagaccgctgccctctgcccttcaccactgccgccctgaccctcctgggtctcgctgggctctgcctgccattgctgagcccctgcaggcatcgtgtgggtcctttgcattcacagtttttacttctccccatagccctgggggaaaggctgccacattaggcccatttcacagatgaagagagaggctcagtggggaggggacttgctggtatcacctccaggaggggtagcttgaagcctctgctgcccctgttgctccctcctcctgacctcctggtggccttgttctctgcttgttgctggttggggagtccaggtggggaacagaaatagcccctctcggccgggcgcggtggctcatgcctgtaatcccagcactttgggaggccgaggcgggtggatcackaggtcaggagatcgagaccatcctggctaacatggtgaaaccctggctctactaaaaatacaaaaaattagccgggtgtggtggcggacacctgtagtcccagctacttgggaggctgaggcaggagaatggcgtgaacctgggaggcggagcttgcagtgagccgagatcgcgccactgcactccagcctgggtgacagagcgagagtccgtctaaaaaaaaaaaaaaagaaataacgcctctccccaggtcctggagagagtggtggacattgagtggggtccctgtccttggcaggtttgccggcctttgcaacctggtgatggtgttctcgtcccagctcctggcttggcccctgcaaatccttcaaccacccagaatcagatgacctmactttcgctccacagtcacgcgccttccccttgttttgatcaccttgtgtttgccaagtgccctggcggctgcgtccttgctctgctgctgcccytccccagaggagtgaggggctggagcctgggtctggcagagctgtggggctgtgtgcagggggactagtgtggtgaaccagccttgacccccttgagggacctgtgacctgccagaccacagaccagcctgagtcacctcagtgtccccagggcatccaccgagccggtttacacagcgtgggctgtttcagtgggagggtgctggsggagagacttcgcaagggggtgggcgcccactgcctgtgttcaaacastggcagcttcaccactgccagctgtaggactgagatgtaggtaaataatgaggtcctttgagcctcagtttcccaatctgcagatgrggataagaatagaaccctgagccaggtgtggtggttgtgcgtgttgtcccagctgctcaggaggctgaggtgggagggtcgctcgagcccaggaggtcgaggcctgcagtgagccatgatcataacactgcactccagccagcgactctgtctctaaaataaataaataaataaataaagccccaaaccagaaagaatagtacccctctctgagttgctgtgttgaactgatacaaattaatcagtcctaggtactttgggcctggcacgagcctggcaggtggtatgcagttatcacgactgctgctattgcaatgcgctaccctgagaagggcccacctcatcggcctggccgcagcctgcagtggctcagcctaggccagcctgggggtcccacagggctgagctggcgcatactgggagctagagaggggctgagggagctctggagaaagcagcagaaggtgcctctccttcctctggtcgacttgagccccaccccgcctccacccccaggaggtgggtgatcacagggtaatgggtcttaattagagcaggcttggatccgtggagcctcaggccctggagggttagggctggtgcatgagggcactgccaggtgggccaggagggtggtggggcagccacgaggggccaggagctggcaggacaaggagttctgaggtgaggttgctcctccctggagcccctcacccgggacgggcaggatgccaccttaacactggctgcatgctctgcgtcttggaaccctctgggcctctgctctgtccccaccagatggagccatagggaggagggactggtgggctcaagggcacaggctgggcttggggaaaggctgaccgtgcagttgcttgtatggtgacccccagatctggttttagaaagctcaggacctgctgcgggagcagagagtgtccaagggcagaaaggggctggggcttggctgaagacgggagcgtgtgaggtgttggggggggcagtgtcatagagaatcaggcgtgtggtgacctcagggccacccaccagaagccatctggggagaggaagggcccatcagagacagggttaggcagggctgagtccccgtctccgtgtgccagttccagagccttctcagaggtgggtttcaccaggcagaggccctgggctgtgaggtcttctgggaacggagctggggtctgtccatgggcagagggtctggggccttgtcctcgaaggcctgttctgggcgtgggttagggccagagcaggggtccccctttgtcctccccttacccacgggcagatcccagacttccttccagaacttctggcagccacctgtgcataccctcatccgttctgttggtcaggccaccagtcagtgaccatgtgctgggctgggtttcctaagtctgggaccaccctgccggaaggggacagctgggaggaagcaggagggagaggccccccctcgagattgcatcagccagagcccgttacataagcagtgctgggcaccgccagggtgtgggggtggctctgcccaggcggtctcctgcggtggcgggggaggcggaggcccggtggcagagcgggcagttgtggactggcatcccatcggctgccccaccacagacagctccccgccagccctgccactgccccaccgacacctgctctgcaggacgactccgagggggtccccgtgcacgttttcagctggtttgaaaaatccccgcctttccacactagtgatcagaggaatggggtggggtcagccggagcagcccagcccctgcccctggctgcttggggcctcacccacataaacccacctggggcggcccttgctgctggctcccctgtgtgccctagccctccacagggtgccctccctgtgtgggagccccaagcacctggccacccttgagggaggccctggtgcagagaggcaccaagacagtggtgcagcccccaccttccactggtgcaaacaccttccactggtgcacattggccccgtgggatgcaagggtgggaggggcgtccgctcagccaccagagccccggtgcccccgaggagtggggacagtggggctaaagctgcacccatagtgtgggccatgggagccccagagacccagggtaggagccctcctgtccccctttccccgcttaggactctctgggggtcccaggccgggcggtgggggcctgtgtggagggtgacaggtgagtgttgggtgcacatgcatgtctgtgcgtctgcatgtggcgagtgtgtctgagcgtgtgggccacactgggggtcgcctcgaagcccttttggtgacccaggggtcaccagggtcaccagactgcctgggttcgaacctggctccaacactgccagctgtaggtggttatgatcaaaaacttcctcgggggaaggggctctctgtctctaaacttgatccagcagggacactctgcccccttcctgggtgaaagcctcctggtggccccaggacctctcgtcctccgcggggtcccactggaggcaaccctcaggctctgagtgacactccctgttgtgtctccactgtcacagaaggtcaggcctggggtgtccatggcagagggtctgaggctgaggggcctctctttgcccctcagcttcccctgagygctcctgagtgcacaggggatggtggagagcgagtaggacaagctggctggggcgctggggccgcaggctggcatgaagggccggctctctcgtgggcccttctagaggactcttggaggttcttcccttctggaagcctcctttgcccccacgggcagaagtgtctctactttggatggtttgattcttgctgctgtgcctgccaagaggaccctccccacagcccctccacagctcatatctggtgcgtgggaactccttttctctatcctgatttcccagatgagcgtcagaccccaggctactgccgtcccagcaggggtctcacgtcacaccccccaggacatgtggcagcccttcctctgggttggaggttgagggaggcagacctgggactgtggccagtgtcgtcaaacatactcccttcccgagcctgcccggccagggccccctcggcctttcgagtcagtgcaggtgaggtgagtcctgaacacccacgtgtgctgggcacggcgtctctctgtggactgtcacagctttctagtgcccagctggaatgcgcttggcttcccgttgtgagtgtgttggaggtgggggagtgcggacctgtgtgcctgtgtgtgcacaggtgcgggatccacgaggagatacgatatggtcttggattctccattaaggtggcatcctctcaaacccatggggtatcctggcatcttccttgctgagtttgtcctgcaaacccctggggtcctcaggtttggggcttgagtgtccctgtgctccacaattctctctctctcttttttttttttttttttgatggagtctcactctgttgcccaggctggagggcagttgtgcgatcccagctcactgcaacctccacctcctgggtttgagcgattctccagcctcagcctcccgaatagttggaattacaggcgcccaccaccacgcccagctaatttttgtatttttagtagagacggggtttcaycgtgttggccaggctggtctcagactcctggcctctggttatctgctcgcctcagcctcccaaagtgttgggattacaggcgtgagccactgtgcctggcaggtccagcattctcgagccacctcctggccacactgtggtcctctctctggagggagagatgggcctcactgaggtctgtactctgctctatcagccccaactccttcctggtagagatgctccgtttctccggcagtgatggcaacaaggcaattctgtttgttgttcatggaggttcagttttctgaacactgtcttatcaggggcaggtggttattgtcccatttacagaggagggaaggaaaggcctggaggtgaggtgatgtcacacagtccctagagctggggctcctgtcctgtgttctctcacttcactgggtttggggagggcagggcagctgtgacctggcacagttgggtgtctgggggtcccagcttccccagggctggctctgtgtctccagggctctcctggaggaagctcaggagtaactgctgccaccttctgatttttccagaagaagaagatggtggtcttgaagccttcgatgactttttccctgtggagcccgtgagccttcctaagaagaagaaacccaagaagctcaaggaaaacaagtgtaaagggaagcggaagaagaaagaggtgaggggcagcacctgcgccggcgagcttggggcgggtggggttgtggctgcatctgcccggccgcagaggagggctggggtccctggaccttggagtttgagggtttctgagagctgagtttgatgaaaaacaccataaccagtttctcgtatgaagcgttgtgcacggaagcctttttaagacgttgctgagctgtcctgtttccggagcaggatgtcggagcgtcatttttccttcctcccgttgtcctatcctgtgcgagggacagggctggattccgtcgccacggtgcctccctacctccctgccccactccctgctctgtagctgactccgtccctctaaactgaaacctgatgaagtgagttggagaagagaagcaaggccccatttagggacagtcacctgcaggtgacctctggattcccgtcactttgtccctggttctcggctggttctggatgggcgaggctgccgcatgctccgctgccttgggttggcagggtgtgatggtgtgaacacgtcccttgtcttcccacgctgctgacacattccgagtgtgcttctctgtgcttcacgcgggctcacttgatcctcatgatcagccctggaaattggtggcatgggagggatgatcgctggttggcagatggggaaactgaggtgggtttgcagcttaaagtccttcctacttggtctaggacactgaggtctgccatttcctcaccatatgctgtctgcttccttctgggcgtctcctctgatcctccaagcgaccctatgttgagagcaatggcaagcacctcacttcacagatgagagcgggggctcagaggtgccctggcccaaggtcacacagtgacacagtggtggtgctgagatctgaatccagggctgtcagctccaccagccaccgctgccaggagtgtttctcccctcccacctgccccggggggacctgaggccagctctccacctttctttcccccgcctagaggggactggcctggccccaccttgcaagtgagaggcccagggaggtagctggtgaggcgcagtggtggtgaggtgaggtgctaatgctaagggggtgcccttggcagcgctgggcccggatctaggcctccctgcagagtgaggtggggaggtggctgccagaagagcttaggggtgggtttggggagcttgtcccaggctggagacactccgtgctgtgagggtttcgggagggcctgttgcgggtggtgcaccatgggcctcttgtcccgtgaacaaggtgagatcactggaaggcttygagcagaggagggactgctatgacatgacatcctggcaggctcccctggcggccctggggwgggagagatggtggtggtggggggcgagggtccctgccttcgcctctgggcctcgggtctgtgccccatttccacttccccggcttgttcgggtacttggaggcattttggggggctctgaactctacctgcagcctgtggttccttttctggtctgggtgtcagcctggggatgttgggagggcagagcccgccctggactgtgtccttggtccccacggagttcagggactgctggggaaaggatggggctgggaggtgttagccccaaccctctggccagagttgccccaggtgtgtaccgcccckgtgctctttgctgggggcggcagtcagcacctctcacccacctcctaccggcccttctctcccrgcccctgccttgyggggcttctgcagccctgggctctcctgggagagcttcctgagtgtgctctgactgtgccccacggccccctggtccagagcctgtgcagcacccccactgctgccactccaagcccctgcccccsacccccacctgctttgcagccaatccaggcccttctggtcctccgtgcacacacgtgtgtgcatgtgactgtgtgtgtaccaccctgtcttcccctagagagaccctggcccctctgcccaattctgcttgccttctctgttgtccctcagctctgtgccccgtctgacacagtgtccgggatggatgtgtgtctgtcccttcccgggaacccccccttaccactgggccagcatgggggctgcatggggaggatttgtgaggtgaagggggaacccgggtctgtggagctgggtgtggaggctcctgcctggcccatcatgccccagagactcccaggcctgcactctgcggctcttgcatcttccccggggtctcaaagagggtgaagctccctgtccctgttatttgatggggaagtggagataggacaggggaagcggggagtgcgtgcctggaggctcccccagggaaggagaggctgtgagccagctcctttgggaggggctccctgaattccctgctgcagccccgccctcctcttctgctgctgtggccgctgtcccctggccccagaggtcggtctttgtgctgggcatggggtagatggctctggagctgcaaggccctgggatgaagacaccgagactgtctggtggaggctgtaaaatcttgctctgctgccatccccgccctcactcctcagacctgggctccatgggctcggggtgatgtggattttaggaccccgaggcctcgtggtccatggcagggactcctacctgtgcacccactgcccacctcctctgacttagaagctgggtgggagtctaggccaagaggggcagtgtcacctgggcctgggtctcaggccactgggctgggtgggcctgacttccaaatgcagaagaaggacccagtggggtgcagcagagacctgtgggagccctgtgggagcccccatcctccccagatagggctggctcccctcccgtctcctgggctcagggtacagcaccagccctggctagggaggcttgggaggtgggcagcgcctggacaggggcgaggcctgggggctgggggccagggggtctttgagacctgggagggctggttctccgacgctctcattcccagggccatgatcacgctgagccttcccttttccaactggcccaggtcttccctcccgcttctttctctgacaatatgtttttgtttttgtccaggtccttatctctctctggctcttgtctgtctgtctctctctgggtctcagacttggtcattccctctggcctgtgcttggtgtccaccttggtaacctctcggcatctcctctctctcctttgccgtcttttctctcttccccctgtaccctcatttctctccctctctttgatttgctccaccccttcctcaccctctctccttctctctactgagatgcagctctggttcttggaaggggaagggggctgggatggacaagaggcctccagaggtgccccctcccctgcatttgagagcctggctcgggccagctgtcagatcttaaggggtctggagcacactgtggcccagctgccgggtgcccctttgcccacctgcctggcagactaggagccccaggataaagacaagggaatttcacccctctgcccctctctgcctccaaccaggtggctccaagatgacggggtgaaggggccagggcaggtgggccgcaagcagcagtttgttagtggggggaggccggcagcaagtcgtggattctgatttacataaaataaccgggctgcagccggaacctgagcatatgtagatgaagctccctgtcagaccctagcgagcgcaggagggagaaatgatttcaacctgtactgcagcggttaccatagcaaccaattattcagtgctaaattataactgtttataacactcgtgaatgggaaggctcctatttcattcttcccttttccctctcaatcttgaaggaccccaaatggagaatgacccactctccgcacccttccttatgagtttaaatgtctccgtttttaggagatgcggtgcgtgtgcggagcatcgggcctagagggaagggagatggaggtgggaggcctctgccaagaaacatctgcggagctgggaaggaggaagggtggcgggactgtccattgggatccccagggctgcgaccrcatgctgtgccctcagcagggtgggggctcagagcagagacccctcctgcctgcccctgcctcctggcacacataggctgggcataacattcaaggcagctttgcaggtggagttcatgtggggactccacatccactaagattcttctgctagctggtagggcgtcccctgtagtcacgcctaaggctgctgcagccgaaaggtcagtgccaaggtcgaaggccaactgtcatctgtatcttcatgcctgcagtgtggtttgatggccctcaaaccttagggttgggttggttcgggggcttagttagggacttattggtctgcgtctctgtctcctcccctgcacgtggcttggtctacgagcctctcagtatgttttgagatactgaactgtgaatctgcctctggttcttgatcgtttctttccttcttgccgctggatgatgctccgtccctccaggtcctgctcatgggccactgctctgctaggtgttttcagaactatttgcagctttctctgcaaggagagattttggaaaaacaccacaaaaaggaggcctagttctagaatgtcaaaacagctggatgcagggttctgccctgcacccccaccctcggccagcccctggtaggggaggagggttcaggtgatatctggtgcaggtgggaggcccagctgtgcgggctccatgtggtggaggcagggcagaggctcagggcaggggaggcaggtggggacttgggcgtcagacccttctcatcgactgggctttccccagtgcaggtggatggaggagggagagaagtgcacctgcttccaagaaatgagggctttgctggcttgcctgagccccagtgggtgacagcagggaaggggccacagatgggcaacagacatgcctgacgttgtctgagcccattctgtgctgagggtctgtgccctcctgctctgccacttaaccctgagcggacgctgggcgagccctgtcagtgctgggctcatggccttctgccagccctactctcccaaggtggcatgcgctgctgctcctgccagacagtggaggctgctggaggtgccttcccctccctatccctccctccttccggctctccctgggccgccactcctggtctcccctgcaggtcgccgaggggactgcttgccatcagatgctgggttggctccccgtagatgttgccacagcagccccttcttgtccaggtcctgctccctctgtaccgcrtctcgccccagctgctggcagcctctgtgcagttggctggagcccaatcccgacagcaaaaatgtgggggtgagcttggtgtgtcccctccagcttgtcgtcctggctgtatctttggcttccatgcagagctggggtcatcatgggttgtttgggcattttctgggcattatcagaatcccagcggcctctggtgtctacatgtggtcgtggtggtgtcagggggaaagggtcattctgactgcagcctgctctggcttggccgagtcccctgcccaggacacagcaaggcggcccagccctggagacctgggtgcacgtcccatccctcccctccaccctggctcagagccctgcttctctgtgcttaggtttctcccgkgtcacagatgttcaaggcattttcttttctttcttttcttttctttttttttttgagatggagtttggctcttattacccaggctggagtacaatggtgcgatctcggctcactgcaacctccgcctcccaggttcaagcgattctcctgcctcagcctcctgagtagctgggattgcaggcatgtaccaccatgcccagctaattttgtatttttttttcagtagagaaagtgtttctccaagttggtcaggctagtcttgagctcccaaccttaggtgatctgcccgcctcggcctcccaaagtgctgggatttcaagcgtgagtcaccgcgcccagcctcaaggcattttcttacagtctccctggttctatcctttctggcattcccagttcacagacgatgaagctgaggtttagctcgcyacagtgacttggccaagtctcaggcttgcaaggggcagagcctccctggggagcccgggactcactggcaggccacgtaggattaaccgtgggtccctcracttcatcctcggtaggtttgtggggtttgctctctagcagctgaaggccacccagggccccttcctccggccagccccagcctctgtccgtggtgctgaagttcatggcggcctctcttgtccttacctttgctggggtgagggctyrgggagagcgtgtctctcagatctcctgaagggcggtctcttgaagctggccaaactctgacaccctcaacgggacgtggacatcactgtctcatctccacctccccaaaggaccgaggccgagcttgggagccgtggctccagggcccagcatctcctccagccttgagagcaggctcccagccagtggctgtgtcagtattcccggaaacacccgggttccggaaaagcaaagagcacagaggccctgctgcctggcagctggcagcgccgctgactctggaggcttaatgggctaagaggtttgggagcagggaggctggtgggcaggggagagggagcggggcttccaggagaggagggaagtgcaggcagcctgttggaaggggtgcttcccagctggatgtcagagggggcccccacctcccctgtcagtgaccgtctccccctccacgaactgttggatgtgactgtttggagccactctcctgggaaaaggcaggtcatcccctcttgacagtgtggcctgaaagggcagagttgggctgggggcctcccaagactatccagggaggccccccgcctttgctgcctcctcattctctttccttctgccaccctttcctttccttctccctccctccctctttccttcatcctccctcctggccactgctgtttcctgagctcattttttatctctccggttctgtcttaatctcatcccatgcctctccttgctcaccccgaaaacagttaacagcagtcctgcgcatggcaagccccgcatgcmccggggatcatggcagtgctgcccggcccctccctgggaaggggctgtggagggcttcgccagttgacttgygtctctaaaggccacaagtaaaccactttctccgaggggcagcacctctctggtggggtgctctggttgtaaacgcccttatctccatataaatgggccattttctgcctgtacagacaggaaactaaatcaaggaagccaagcttaagagctgcctaaattaccttgtctcatatggagaggaagcggccaggatggggtgggagagggggaaggtgggcttgtgccatccatagcagtgtctgcagagtccgcacatggagaaaactgtgatgtgcctgctgcattaattacaggtttcacctgacgaacgcagttccatgggatgtgaacttaagcagagagctgtggcgctggggcctgagatgcagcggcccttccctggctggggctctccttctctggctggggcccttccctggctggggctctccttctctggctggggcccttccctggctggggctctccttctctggctggggcccttctctggctggggcccttccctggctagggctcttcttctctggctggggcccttccctggctggggctcttcccttgctggggcccttccctggctggggcccttccctggctggggctcttcttctctggctggggcccttccctggctggggctcttcctgtgcactttgctttttgactctgggaccacatcctccaccgccagctcctgggtccatgcctcatcatgtaaaactaattcagcccccaaagtccatagaagcccaatgatgactgaagcggagcctgagttcacccgcagggctgctggagtgggctgagccgagcttgcagatggagaagcctgctctcacgagagcctcacctcgcctcacctgcaggttctactgcttcctgtggcgtagaccctggggacaagacttggctcaggctggcttggggttgcccctttggctgggctttggggctgagctgtgagcagtggcctctgatgatgagtggagtgatggggatcggtcgatccccagcgtgggccaggaggtagctctcagggccgtcctgccacccaggactctggatgttcctggggcctctgttgccctcactgtcccccttcttttccaggggagcaatgatgagctatcagagaatgaagaggatctggaagagaagtcggagagtgaaggcagtgactactccccgaataaaaagaagaagaagaaactcaaggacaagaaggagaaaaaagccaagcgaaaaaagaaggatgaggatgaggatgataatgatgatggatgcttaaaggtaactgtggaggcctggctggggggacagagmgacatccccctttaagggggctgagcctcttgcctgtatgttctgtgtgtgtgtgtgtgtgtgtgtgtgtgtgatggagtctcactctgttgccaggctggagtgcagtggcgtgacctcggctcactgcaaccgcctcccaggttcaagcaattctcctgcctcagcctcccgagtagctgggactacaggtgcgtgccaccacgcctggctaatttttgtatttttagtagagacaggattttaccatgttggccaggatggtccccatctctttttttttttttttttttttgagacggagtctcgctctgtcgcccaggctggagtgcagtggcgggatctcggctcactgcaagcttcgcctcccgggttcacgccattctcctgcctcagcctcccaagtagctgggactacaggcgcccgccactacgcccggctaattttttgtatttttagtagagacggggtttcaccgttttagccgggatggtctcgatctcctgacctcgtgatccgcccgcctcggcctcccaaagtgctgggattacaggtgtgagccaccgcgcccggcctccatctcttgacctcgcgatctgcctgccttggcctcccaaagtgctgggattacaggcgtgagccactgcgcccagcctgttctttttttcttttttagaaggagttttgctctgttgtccaggctggagtgcagtggctcctgccttagccttctgagtagctggtactacaggcacgcatcaccacgcacagctaatttttgagtgagcagctatttctaggggagagtgatagatagtgtgagctcaagtttagtgtcaggaacctcttgcttggagcaattcgggaaaataaaacaacaaatggagtctttgccacaagaagtgctggacagctttgtttatggtagaaagggaacttgtgttctgaaatcctgcccaagcaggcattcccggagtctcctactgcacgtggggcagagcggctacagagatgggccagctctcccctgggcccagcgtccccaggaacatgggaaatgatgtgaaggaagccaggcctttatggtcatgctgaggtgctccggagtctcagaggctgcaccctggggctccttggggagatggagaggccaggggtgaggttggtggacaggcagtgggtgagtgacagtgccattcaggaacactgtgctccctttgttcttttaagagacaccaaggctcggtttgggctggtcacagatttaaagataaacgctctgtaaatattagtacagttgctgttgggtgaggcagaaatcatgaatgtgaataactgaagttgggaggtgtgggaggaggagcgattcttcctggcggtgtcctgacacctggggtgatttcatgagtcagtggagtgttgtgagtcaccggagacggatcgtcgctgcggggctgacagttctgaaagcttcacttaagagagtgattcaggatcaccctgtaacagtatcatcccctcgctcacctgctgctctgctgtcctgggtggggaccaaggggtccgtgtgccatcaggaatggccatgtgtgtccacgggggcaggtcagccacagagggggccccatgtgaggaattctctgagctgtcacagaacaggaggcaagaatgggctctggaggcctcccgcagcctggatgggcagactggttctcagtgctgggagacgctcagggcagcctcctgttgcaggagcagaagcccagctccggggcctaggcagtagagggatgtgtgggatcagggccctgagaactaagaggcaaggggcttcggggttgtgggacccagtggtgttatcagaggctgtctctttgcatcattcactctgcctctgctgtggcagtgttgggctcaggccaggcaccctcatggctgagcattcttgtggctgagaatgagggcagcagcagctcggggcttcttggcccctccagcaggagggagagcaggcctcccatgtccaggtatgcaggcaggagaccagcattccctctgattggactggcttaagacatgactggcctgaccagactttggcctaggagtggtgtgtactgattggcttaatgtatcaggttgggtgggggcagctcagggctgcttggaagaagtggggtgtcagggaaggaagaagaagggtgggttgggtgctaacaattgctaacgcattttgacacaccctgttccaagcacctgcactaagtcattctgttctgcaaggcagtgtgccattatctccattttacagatggggaaaccgaggcaggaaagttaagtaacttatccacttcttaccaccggtatgtggcagagccaggatcagaaccagcccatgcccacatccggcacctccctttctgagccccgccagcccgggcctggtcatctggtcacctgacccctgggctagctctcttgagaactcactgtgcccctgggatgtccccccaccccaggcctcagcagtagttggatcctctcagggctgtgcccccaggatgtccctccaccccaggcctcagcagtagttggatcctctctgggctgtgccccyagctggcccattgtcccatgcccctgccccagcagagtgcactttcctttcactggaaactggcagtggcctgtccttcacaagggctgacgtagctatacctggcatcctggggaggcctcatgtctttttttttttttttttttttgagacagaatcttgctctgtcacccaggctggagtgcagtggcgccatctcggctcactgcaacctccgtctcccgagttcaagtgattctcctgcctcaggctcacaaatagctgagattacaggcacacaccaacacacccaactaatttttgtattttagtagagacagggtttcagcatgttggcccggctggtctctaactcctgacctcaaatgatctgtctgccttggcctcccaaagtgttgggattacgggcgtgagccaccacccctggcctggaggcctcatgtctttctaaagtggcttaggcagccctggagccctgcggcctcatcagggacatcttcccgtcttcaggccactgtgctgtcctgctgtccaaatccccagaatgcagtccccacagagggcaagttctgttgtcctgccctggtgtcccgaggctggtcgggcagccctatctcaggatgggggcctggtctcaggcatccagtctccttgcccacacctggctgatttccctttctggaagttcagggcacacacatggcctctccccaaaccctgacgtcgaacacttggcctgcacttcgtgggctggcatctgagacgtggcacagattgggggctgcggggctgcggggctgcagggcttgaatgtttcctagggtgggtgagaatggtctggttacattgcagacacaacccctcctctttcccctgtgccaaagcctcctaggcagagaccctggggatgggggtgcaggtcagaaggcccctcaacaactctacctctggcctgggtctctgtaggagcccaagtcctcggggcagctcatggccgagtggggcctggacgacgtggactacctgttctcggaggaggattaccacacgctgaccaactacaaggccttcagccagttcctcaggtgggcggggcactagggctgttctccaggcccgcacatcctctggtggtaccaagtcgggagggaggcagaggagtgaagccccggcacctggggtaggggtgggctctgtcagaccgactgagcaacctgggggagctggagggagggggcaggaccccttcatgttaacagaccaccaggccttcccttgtgggccctgcccctcagcccttgagtctcttccccttggggaaggtggttccagtctttcctggggggtctttcaccaccatggcctctcagctctggtagaggtgggacggagaccccaaggcccactgtagcccacctgtggccccacaagtcttgcagggcctgaaaacccaatgagaaaatcaccaactgtgtggacaggaagctggggtgttttgggggtgggctgtgggtgtggacaggaagctgggtgttttgggggtgggctgtgggtgtggacaggaagctggggcgttttgggggtgggctgtggtcagtgggtttcccgcctaatctctctaatcaggaacctggggctgctgccatagatcgcacatgtggcagaggggtgggccctgccgggggtcgggtgggcctctcatctcacctggccttgccctcaccctcctgcctctccccctacaggccactcattgccaagaagaacccgaagatccccatgtccaaaatgatgaccgtcctgggtgccaagtggcgggagttcagcgccaacaaccccttcaagggcagctccgcggcagcagcggcggcggcggtggctgcggctgtagagacggtcaccatctcccctccgctagccgtcagccccccgcaggtgccccagcctgtgcctatccgcaaggccaagaccaaggagggcaaaggtaaggctggggttgggtgggcacctagtcccgctgggaagaggtccctttcagaccctataggagaagccacggggcagacgcgggcagggaggggcagctggggtgctcctaatggagggctctgtgcctgtgtgaccttggattgcccggtcctttctcagcagtgaggcagcatcgtcgcctcttttgtgcctgactcccttttggggttggtggagaagcagaggcgatgatgtgggcagaggtctgggaggtttgagcctggccagccaggaggtgcccccgacgtgggcctggagggagggcgggaccagaggtacgcagagtggagccgctccagcctgggtttctgggagttggcaggctcttgggtttgagcctgtgccgtttctggggaggaggaggaggccccagtcgagcccgtctcttcttcttgtctgcatacccactgtgtgcagggttgttctccaggccctcggccaatgtggagcatggaggccctgcccctccagctttaggatccgggaagcaggcaggagttggagggactgggcacggccaggtctcgcttcccagggaggctgttctgggacaggcctggaaggagatcgagatccaaattctgcctcagtggcagggcgtctgggtggggaggatgcaggcagcagasgccccctgtgacttgaaggccctggggagggagctttctgggtgcaggtttctggccttttggaggctggggatgttgatctccccagggctgtcagtcacctgcagctcagctttcctgggtgccctgatttgttttgttttgttttgttttgttttgacagactctcactctgtctcccaggctggagtgcagtggcacgatctctgcacactgcaacctccgcctcctgggttcaagcaattctcctgcctcagcctcctgagtagctgggattacaggagtgcatcaccacacctggctaattttttgtatttttagtagagacggggtttcaccgtgttggccaggctggtctcagaactcctgacctcaggtgatctgcccacctcggcctcccaaagtgctgggattgcaggtgtgagccaccgcgtctggctgatttgggttttgatggaaggggctgagggggctccggggatcccttctttcagccccaaggagctttagtttctggggttctgtgtctggcatcaccatgccaagtctctgaagggagcctggtgggtgaagtgacaagggtcagagtctgttccctgtcctgctccatctgtctgggccatcaggatctcgggaggggctcctggcccgcccctgtctgcccagcctgccttgttttctcatttcctctcgcgctccagctgctgagctatcgattccatgagctgcttattcagagcttggaaaattgaaatagattttccgcggcgccatggagggtgcagctgggctcctagctccatgtccgtgtgtgtggtgtggccagaggacggcctggggagaggcygcctctgtggggtgtgcatccctgcctccaggccccmcttccttcttgggtcattactccccaggtagctaattgccctgtggccagctccataaaaacagcctcagccctgctggcccttgctggggttgactggcagaggtggggcagtcttgggtgggaccagcattgcctggctggcaggtgggaaaaggccttttggctccaagacatcctttgggggctcaggcatggaccacaggtgggcggctgtgccttyagtggccctgctggctgtgggggatggctagtgcctcctttcagtggttggagacggtataggggatcctyccaaaagggccacatttctgtgggtcrtggacaaggggcagcaaggcggtcagggcagcctccagtcagagccgtcatctggtttttgcctcacttgctgtgtgattttaagcaaggggtttacctctccaagcctcaggcatctcatctgaaacggggtgatggtagaaatgaccctttccttattgggtaaccgagagctcagtgagatgatggcaggaagcaggccgtcagtggtggcagtggttggctatcatcactgctgtttttcagggcctggagtgaggaagaagatcaaaggctccaaagatgggaagaaaaagggcaaagggaaaaagacggccgggctcaagttccgcttcggggggatcagcaacaagaggaagaaaggctcctcggtgagtgtgtgcgtgtgtgcgcgtgtgtgtgcatttgcatgcatgtgtgtctgcacatgagcaygcaagggccaggcgagggccttcagttcattacaaactagctggggcaggtygcacccctccactattctccttccatcctacatgcaggtgtgctgggcctcagtttctccatttgtgtgatgaggagtttagattgaatccttccaagggcccttctagcctggactctgggcagggagtgctcccctggctcaccctcctgagtgggagctcagtcctggctcctgctgtccacagctgcaactccatttgggcaggaggtggagggatctgtcctggtggggcctggccgcccagcacccaggtctgctctcggggggagtagttgggtgggggctggaccctagagaagtggtatgtgggyaggatcaggctggctggagccccagttacctcctcctgtcctcagggccagctctgggcccaggctcagacactaagyccaggtcttactcagccttggggcccccctttctctgtgagtgtgaggggcattcgccctcctcacccccacaggtagctgcctccctcacctcaccccagccctgcggtggggtggagttggaagctctttccctgcaccatggcaggagccagtgttaggtctggaggggagcatggagagaaggtgtggcccgccctggagctgacggtccagttcagcttagcagatatttgttgagcacatactgtgtaccaggcccgctgctcagccacagtgggccgtggtcctgtagcactcgtcacctggcaggcatgtttgctggtggagagcccgtgatgtaccagtcagacaggacaggccagacctggcacacacgcagccacagtaggtccagtaaaggagagatctgggaagacttcttggaggaggtgtccctagggctgccccttgaaggatgtttaggagtttggcaggatggagggcaaggcctgggaagctgttcagaggtggaaattgtgggaagtgtctgaggctggagagcagggctctgggtaggcggtgggacatcaggctggacaggcaggctgtaatgtgaggttttcagctgtgttgggggctgagrtgaatcacagagagcactgtgtctccagagcctcttccgtgctttgtcccaccccacactgcctgggccagcgaagccttctkggtgaakccctgggatcacaggaccctgtcttcccctgcagagtgaagaagatgagagggaggagtcggacttygacagcgccagcatccacagtgcctccgtgcgctccgaatgctctgcagccctgggcaagaagagcaagaggaggcgcaagaagaagaggagtatgactccccttccagagagttcttggcctgctgggtggatgtagtggggcacgagtaggactccccatctggacggttctcggcctgccgggtggatgtgcggggcatggaacctcccygtgggaagcagggggagggcatcctcatgtctcagccaggtggggcccctgtgtttcccacacggccctggtttctactgtctggggaggggcatcctgtcccagtaaggaaagaacaaggaacctatggtgggagctaccccagggcatttgcattagcagtgtggtgactggagagggaagtgcttcatctcatcrccatcctcccttcagtcaccccccacccacttaacacccatctttacctcaccttccttcccatccctccttctccctccttccctcagtcccttctttttatccatccatccttcatccatccagccattcatccatcatccatcatcaatccatttgtccatccatccrtcagctatccatccaccatccatccatccatccattcatccatccttttgtccatccgtccgtccgtccgtccrtccatccatccatccatccatccatccatccatcctatcatccatccatccacttgtccatccatccatccatccatccatccatccatccatccatccttttgtccatccatccatctgtccatccattcatccatcccatccatccatccacttgtccattcatccatcatccatttgtccatccatccatcatccatccatccattgtccatccgttatccattcatttgtccatccattatccattcattggttcatccatccathctaccactctgtccatccatcatccatttgtccatccatcatccatttgtccacccatccatccatttgttcattcatctatccatccttttgtccatctatccatccatttgtccatctatgcatccatccttccatttgtccatccattactcatccatttgcccatccatccatccatccatccatccatccatttgtccatccatccatcatccattcatttgcccatccattcatccatccatttggtttatccatatatccatccattcttttgtccattcatccatctatacatccatctatccatccacttgtccatccatccatccatccatcatccgtccatttgtccattcatcatccatccatccttccatccacctatccatccatccatttgtccatccatccatccatccatcagtccacccatttccatttgtccatccatttgtccattcatcatccatccatccatcchtttgtccatccattcatctatccatccatttgtctatccatccatcatccatttatccattcatctttctacccatccacccactctcctacccttccttccttccttctttccttttatccatcttctatctcctcacccttttaccacctcaaccatcagtctattcacccacccacctttccatccaccctctattagacatctactctgtgcctgtctggcctggggcgatgcagttggttgtgtgctgggagtgtggatgaggacttccatgactgcctctcccctaccctagttgatgatggtgacggctatgagacagaccaccaggattactgtgaggtgtgccagcagggtggggagatcatcctgtgcgacacctgcccgagggcctaccatctcgtrtgcctggacccagagctggagaaggctcccgagggcaagtggagctgcccccactgtgtaagccttggcagagccccgggctgggggcggggccacgmctggctcccccacccctgtgccctcatttgggggcagaatgcggggagatgctgtaggggagggagggagtcgggcctggtggagcggggaccccgcccagggtgcctccacctggcctcctcccccaggagaaggaggggatccagtgggagccgaaggacgacgacgatgaagaggaggagggcggctgcgaggaggaggaggacgaccacatggagttctgccgcgtgtgcaaggacgggggcgagctgctctgctgcgacgcctgcccctcctcctaccacctgcattgcctcaacccgccgctgcccgagatcccaaacggtgaatggctctgcccgcgctgtactgtgagtgttccgcccgccccgcgccggacgccccgccccaccccaggaacaggccccgcccccaggggaaggcctgccctcctcaaaaggccccgcccctgccggctcctgccccgcctcggtagccgatcccgcaaagcttcgcccgcgctgctcgagrccccgtccacaatagcttcctcgcgcccttctccgcgtctgactcccctagagacgggaggcatgagtgttagggaaaggcagacaggtgtggtgatcatgccaacaccgcgaccactgttcagtgaccacgtgctctgcaagggctccacatccatcatagtgtcctttaacattactgagtattctggcaccaggcatgttactccctttttagatgagaaaactgatgctcagggaagcagagtgacctgcctaaggccacacaagggcagaactatccactcaaattcaggttcctggagccaccccagacctggctcctgttccaaggctggggatagggagagggcaggaggcttctagggcaggaggctcctagggcgggagcctcagtttctacaggaagaggggcaccccccatccgtcaccccccagtcacagtagacatcggaaggccccttgctctgagctgtctgtcctgccccctgtggtgccagatcctccacccctcaggtcctgggctgtgcctcctttagccctgggccgtcctgtgtgcattgtgcgtgtgtatgtgtgtgcgtgcatccgtgcgcatacttgtctgtgtctgtgtaggggccaggggaggacccttttgaggggtgcagccttctgtgctttcctaggattgatggaaggccctggggatgggaggggggcaggagtggggttcctctcagcttcttccctgaggggctgggatgggggtaggagggtccatggcctgggtaggaagggtcccctcttccactcccccaagagccagtggaggagcctttcctgcctcccatgtcctcctcctcctcctctgcctctcrgcctttgctgtcaccaaggccaaaggaaggctggctgtgtggtgtaccttgcacctccagaatgccttcaggtgtgatgtggcaccacagatctggyaggtggaggaaggggtgggccattttacagatgggaaagcaggctctggaggcttggatgagtttccgaggacaggtagtagcaaagctgggacctgctatccccaccagagctgtctccctgaatcagtcacccccgaccctgtccagtcagacagcaccgcctccttggagggccaaggctgctcccacccatctcagggcccgagtggtgtggtttgtggctgttgtatttcttgcctttgccagccagcagctcactgtcaccctagcatctgtcagggcccctgcagtgtgtctgtgggctgccagagatggggcctcattgtcccagcctagacgcacggtgcctgggtgcagccctgccccgggtgagggatggtggatggggctgccgtgtccctgggctccagcacagggctcatgctccctgagtgcttggggatcacacagtgatgtgacctcttttcagggggcaatgggaagacctaaggtaggggaagtccagaatctcatgttctgctccctgctctgctgtcccttgccgagtgggcctcagtttccccctctgtcctatgcacrtggcagtctcacctacgctggctcagatattctgggtgccgataagttcaccattgagtgaaagggccacgtggtctcacagacccccactgcccatctcctgtgtgcatgacccatgcggctcctggggacggggtggatgtcatggcgtcaccgtggtactgttctgacttgggggcagtggcactgatgggagggagcctgcatggcagcctgctgtcatgggagcctcagggtggggccctgcagctgagccccaccttggggacccttctctgtccacagtgccccccactgaagggcaaagtccagcggattctacactggaggtggacggagccccctgcccccttcatggtggggctgccggggcctgacgtggagcccagcctccctccacctaagcccctggagggcatccctgagagagagttctttgtcaagtgggcagggctgtcctactggcaytgctcctgggtgaaggagctacaggtgagtgcccgggagggtggctgtgctaaggcccgggacctggtgagccctggaccctcctgggctggcgggaaggkgctgaagcgcctctgactgaggggtgctgttgggagttggggtggtgctgagcgggargattgtcctgcctgggacctgggctggggctagaggagctgggtagggagatgcaggggaccatggcccatctcccttctgtgactttgtgccgctccatgagcagctggagctgtaccacacggtgatgtatcgcaactaccaaagaaagaacgacatggatgagccgcccccctttgactacggctctggggatgaagacggcaagagcgagaagaggaagaacaaggaccccctctatgccaagatggaggagcgcttctaccgctatggcatcaagccagagtggatgatgattcaccgaatcctgaaccataggtgtgtgcctgcaggcggccaccctgcccatcgctggggccgggccacgtcagcttctttgcccwgtaaaatgggtgcagcgcagggtgccagggcccttgctttggggctgccgtgcrgaaccacatgtgggcacagcaggggcacaaggaagggcccagggttcccagtgctggagatctgcctgacctgctagaggggccgtcccatgcatgccggcacactcatgcatacgtgttcacacccctggggcgtcgggaccctcatgctgggttagtgcttgayaccagcaagagggttctgaggacgagggacgcccgaggtgtgggagtatgtccacatttcccccgcgtttgtaacagcagctggctgtactgagcactgcctaccctgggagggaggcgtcttactttcacctctgttttactgatgtgagaataggcacagcaaggttaagtcgccagaatcacacagccacggggtggagctgggatttgaaccccatgctttctgactgcaggacctgctttcttagctactgttgcaccccccagtgccccagcagcagctcttcctggagcagtctggcagttccctgggatgccttagcaatcagaggctgcaggaggctggcacaaagagccagaggcaggaggcccgtgggctttggttttgatttggtgggtggtgggaatgcctgctgattcttgagttgaggtgcttgagaactggtggtggctgacagatgggccttggggtggggcccagagtacctgctgcctggtggcagcttggagcttgtgctccccatcccagctaccctgtggcctctgtttttgaggggcttaggatcggtggcctctgacactcagtgcttctggcttcaggcagctgttgggtagagcagaggttaaaagcctgarccagatgttcagatttcaatcccggttcccatctgctgagctttgaggcccttttagggaacaggctgctgcacgggtgacaggagcttgccagaggctggctgtgggtggtcttcagtacgagggtcgcggaatttgaaaaactgccccccttcaactatgggacaccccccttttcctccccaggcctccctgagaatgaccttcaagggtcagttcctgtgggaacctgagcccggcaatgaattggcccatggttttctacctttactaaattacatgctaaaaatatacatggtagtttttctctctgccccaaagtggggcaggtgaatctcccccagatttgttcccccaatctgcaaaacaatcaattatgtatgggaaaacaaacaaacatcggttgccgtggtaacgggatcggtttttctcttaatgttcccaggcccgcagcagccgctgctcaccgggtctgtgtgcctcctcggcactgctgtgtggggtagycaagccccagcccggccctccagcactcctctggcctggttgccttagcctgggtgggtgggaggccctaaagaccctcccagtggccagaatcaagctgtgtgctgctgggcttggtcactgggtctttgtgtccccagaagagaccacctcacacgcaggaattgcatccttatctactttgcagagatgactcctcaccctacgtgggcactgcacaagtcctttgcgtattttaagttagaaaactgagtccattggcaggaaggagaactttccaacttagaaatccagaactcctgtgaaaatccagaccctgtgacaaatgggattcatccctgccacagaggctgcaaaggatgtgggaggctggctcattgctcctctgttagctggcctccgtgtccctctccagctctgccacatccccctctcattcgctgtgtggccccaggcaagccgctgcacctccctggagcttctgccctcgtctcctcctcctggctgggcccagcatccgaggggaccctgggtgtgaatggctctgcatcctgggaggtgcccttcatcaaaccygtgctgtggccactgctctgagcgacccacatctgttcaccgtgttgcagctttgacaagaagggggatgtgcactacctgatcaagtggaaagacctgccctacgaccagtgcacctgggagatcgatgacatcgacatcccctactacgacaacctcaagcaggcctactggggccacaggtgggtcgcagggatccggctgctaggcacaggctgccgggacctgctcctgggctgagccttgctcacctgcctccaatgccgtttcccagggagctgatgctgggagaagacaccaggctgcccaagaggctgctcaagaagggcaagaagctgagggacgacaagcaggagaagccgccggacacgcccattgtggacgtgagtggggagggtggggcagcagtgggtggggttgccagggcctgcccacctcagacttgaatgtgcagggggtgtgtgttctcaaaaggatgtttccttgggccctcatggcttatgcagacagtgtcatgcccatgtaggctaggacagctggaaggcccctcataacactgcagctgacatgctacttacacaccactctcacctgggaggagacccaggatgactcactcagcagagctccctgggtgtccactagcgcctggccctgggttggccctgaggagacgagggccagtgagccctgggtagctgtttcagaagacacactgtcttctaggggcccttggtgggtatccacagaacacggagggcctggcctgggactatcaggcgcctgtcagatgctggggaaaggcagatgggcctggtccattgggaggactgcatggggccagtgacctggagcaggatcaagagacaaatgggccgggcatggtggctcatgcctgtaatcccagcactgtgggaggccggggtgggaggaccgcttgaacccagaagtttgaggcaacgtagtgagatcccacytctacaaaaaattagccaggcacggtggtgtgcctgtggtcccagctactagggaggctgaggtaggagaatcccttgagcccaggaaattgaggctgcagtgagccatgattgtgccactgcactccagcctgggcaacaaagactctgtctcaaaaaaaaaaaagtaaatgtctggatccagtggaggagcctgttactgggggcgttgcgaatgccccagatggatgttcgttttgttgttcatccaaaaaatggtgagtaagtgaccacatgtcccaggcactgtgtggtactcaagaggaggcagtgaacaggaccaaggtggtgatgacaacctgggctcagagtcagagaattcaacagtcgggaaatttccctgataggagaagtacagggctgccatgggaggacactgtgggagcacttcagccaggctgggagtcagggagggcttcctagaggaagaggtgttccatccaagaactggagaagagttaggaagacagacaggagtgggaagagtgttccaggcagaaggaattgcatgtgcaaaggcctgtagtgtggactctggtggcccaggatctggggcgtgtctgaaccgctgcctcccctgcagcccacggtcaagttcgacaagcagccatggtacatcgactccacaggcggcacactgcacccgtaccagctggagggcctcaactggctgcgcttctcttgggcccagggcactgacaccatcctggccgatgagatgggtctgggcaagacggtgcagaccatcgtgttcctttactccctctacaaggaggtgggcaggcggggcaggcggccaggaggggtggctggtcctggccaagggcaggtggtctcacggcatcggcctctctctccagggccactccaaagggccctacctggttagcgcgcccctctccaccatcatcaactgggaacgcgagtttgagatgtgggcgcccgacttctacgtggtcacctacacgggggacaaggagagccgctcggtgattcgggagaaygagttttcctttgaggacaacgccattcggagtgggaagaaggtattccgtatgaaggtgagggctcgctatccttggaaggayggtaggaaggcccccggtctagttcagggaccacgggtgccgtgcactcctttggggtccctcagcctgggagggctaccgaggccggcaggctctgaggggcttgtcctagaggctgagttacagccatgtcagttttctggggctcctgtaacaaagtgtcacaaatggagtggcttcaaacagcagaaatgtattcggtcacagttctggaggctggaggttggaaatcaaggtgagggcagggccacgtgcctctgaaagccctaggggagaacccttccttcctccttccagcctcctggtggcggcaggggttcactggcctacagctgtcgcgtcagtttctgcctctgttagcacatggggttttcccgtttgtgtctgtttctcatcctataaacacatcattcatactggatgtagggcctaccctaatccartatgatctcatcttagctacttattttatttatttatttatttatttttttgagacactgtatcgcccaggctggagtgcagtggggcgatctcgactcactgcaacctccccgtcctgggctcaagtggttctcccacctcagcctcgtgagtagctgggactccaggagtgcgccatcatggccggctaattttgtattttttggtagagacaggtttcaccatgttggccaggctggtcttgagcttgtgacctcaagtgatctgcccttctcagcctcccaaagtgctgggattgcaggagtgagccactgtgcctggccccaactaattattattattattattattaattattattattatttttttgagacggagtctcactctgtcgcccaggctggagtgcagtatggcacgatctcagctcactgcaacctctgcctcccggttcaagcaattcccatgcctcagcctccagagtcgccgggattacaggcacatgccgcaatgcccagcgaattttttgtattttggtagagacagggttttaccatgttgcccaggctggtctcgaactcctaagttcaggcgatctgcctgccttggcctcccaaagtgttgggattccaggtgtgagccaccacgctcagcctattattwttattattattattattattattattattttgagacagggtctcgctctgtcacccaggctagagtgcagtgattgatcatagctcactgcagccttgacctcccgggagctgggactacaggtacacaccaccacactcagctaagttctaaattttttgtagagatggaktctccgtatgttgctcaggctggtcttgtacttctgggctcaagtgatcctcctgcctcagcctcccaaagcatggggattataggcattgagccaccatgcccagacaactaattatgtctgcaaagaccctatttccaaaagagcttctgggtggacatgaatgttggggggacactattcaatgcagtgcaccagctgtgtgacttctggcaagtcacgtggcctcactgggtctcagtgttttctcagcaaaatggagttaacagacacaccccacagagtcaagtgagttaataagcatgaggtctcatggtgctgtgaaccctgcaaggtcttgttaaagcacagtctctgacccagcagtgctggggtggggcccgagcctctgcatttctttttctttttcttttcttttttttttttgagatggagtctcactctgtcgccaggctggagtgcagtggtgcgatctgggctcactgcaacctctgcctcccaggttcaagcgattctcctgcctcagcctcccaagtagctgggactacaggcgcgtgctaccacactcagccgctttttgtatgtttagcagagactgggtttcacatgttggccaggatggtctcgatctcttgacctcatgatccgcccacctcggcctcttaaggtgctgggattacaggcttgagccaccgcacctggcctgagcctctgcatttctaaaccctctccacattgaggaatgaggacttgtagccattggcccctagaagatgtcagtgctacagccttgggggctggtggatcctcgcacaggccctccgagtccctcaggtcggcctcctccactgcctcctagcagctgtggctcttagagatgctcggaaactgttgaatgagtgaatgaatcgatgatcccacaggtgactttgtagatggatgagcccctggatcatcagacgcaaaagaacctcccctgagccacactgggaccctgccgtgtgccaagcactttgctgatttggctcttctattttattgttaagagttgtggtaaaatacacataatgtaaaacttaccatcttaaccgtttttaaaagtacagttcagctgggcacagtggtgtgcacctgtagtcctagctacttgggaggctgaggcaggaggattgcctgagcccaggagttcgaggctgtagtgcgccatsattgtgtctgtgaatagctgttgtactcttgcctgggcaacataatgagactctgtctctttaaaaaaaaaaaaaaaatcagccgggcacggtggctcacccctgtgatcccagcactttgggaggccgaggcgggtgggtcacctgaagtcaggagtttgagaccagcctggccaacacggtgaaaccctatctctgctaaaaatacaaaaattagccaggcgtggtggtgggtgcctgtaatcccagctattcaggaggctgaggcaggagaatcgcttgaacctgggaggcggaggctgcagtgagcaccattgcactccagcctgggcaacaagagctaaactctgtctcagaaaaaccaaaacaacaacaacaacaacaacaaaacaacaacagaacagtttagtagtgttaagtacattcacattggtatgcaaccagtctgcagaactcttttcatcttgcaaagtggaaactgtccccattaaacatgaacatccccaccacctcgagcccctggcagccacccatctactgtctgtctccacgaggttgactactctgggtacttcatatgagtagaatcgggaaacatctatctttttgtcactggctcatttcactgagcagaatgtccttgaggttcatgcatgttgtggcacgggtcagaatttccttccaaggctggagaacccccatcacagggatagaccacattttgtttatctgttcatctgttgttgagcacttgggctgcttctggcttttagtggtcgtcagtaacgctgatgggaaggattatgggtgtgcacatatccctttgtgtccctgctttcctgtcttttgggtatacacccagaagtggaactgccggatcatatggtaattctatttctgattttttgagaaacagacttagctctttgagwtctcatagcattcttcacctagataggcgaggagaccgatgctcggctaaaagattgtgtgcaaacccaggtgccacgtgcaggcaaagcctatgctgcacggcatcctcggccctctctgctctctcacrggcatgtgggctgctgggagaggcaggcttggtgcagcacaggacaggcctacatcactggrggagaccggtgcaaaatgaaaatgcagggctcgcaggaaaacagctttttcctttcttctgtggtctctgtcaacatgccaargtgttttaaatttgcttgcttttttttttttggagacagagactcactctgtcacccaggctggagtgcaatggtgtgatctcggctcactgcaacctctgccttttgggttcaagtgattctcccgcctcagcctcctgagtagctgggactacagatgtccaccaacacgcctggctgatttttgtattttttagtagagatggggtttggctatgttggccaggctggtctccaactcctagcctcaagtgatccttccaccttagcctcccaaagtgcagggattataggcgggagccactgtgcctggcctaaatttgctttttaaagtcrtgttccttcaggtgtggggatcctcaccgggagagtgcagaccctcacaggcaccaggccctgtcctggaacttggtgcatagaccgggtgcctggctccccctccccaaccagcacccaggtycaggcccccaccagggggagtagggggacagtggtcaccaggcaggggcaggggagcagggaatgagaacctgtcccagggaggctccacgcccccagcacacactccattgtsccctgggatatttgttacaaaacacaaattcaacaataaacaacaaaatgattaataatttcacatcagcaacctcagggcattaaaccccaagtgcagggtccctttctctgttcatatcctggctatgccatttgttagctatgggtacctgggagagtgctccagcctgaggccccctgagctttaaatggggataaaaggccaggtgcggtagctcacgcctgtattcccagtacattgggagactgaggcaggaggattgcttgaggccgggagtttgaagccagcctagttaacatagagagatctctctccaaaagacaaacataaccctggggggagtgggggataaaggacacaattgagcttgtatgttttgttaggatgaggtgagagtggaaacaaagtaataagcccagagccagggctggtcgtggtggctcacgcctgtaatcccaacactatgggaggtcgaggygggcggttcacttgagttcagaagtttgagaccagcttcagcaacatggtgaaaccctgtctctacaaaaatacaaaaattagctgggtgtggtaaggcatgcctgtagtcccagctactcgggaggctgagatgggaggattgcttgagcctgggaggtggaggctgcaagtgagtggtgatcgtgccactgtactccacgctggggggtgggagtaagacactgtctcactggagctgttacaagcsgagrccgtttcttctcctcctccacaccaccctctctcagggctgtgttctgagcctcagtggatgcccctctgcttggtggtcagcatctgcccctctggtcctaggctggccggcccagggctccgtggagcctttgtgggttcctgtgcacacctccttcttggctctttgtctcctgggactgtgatccgctctgctcccagccgtctcwtccccaangcccctcttttctccagaaagaagtgcagatcaaattccacgtgctgctcacctcctatgagctcatcaccatygaccaggccatcctgggctccatcgagtgggcctgcctggtggtagatgaggcccaccgcctcaagaacaaccagtccaaggtaggtggcgctggccgccagaccccagagcttcccggggcgaggggccgcccagagccccctgacaggccccactctcctcccctcagttttttagggtcttaaacagctacaagattgattacaagctgctgctgacagggaccccccttcagaacaacctggaggagctgttccatctcctcaacttcctgactccagagaggttcaagtgagtcacctggatctggctagggaggtggtggtggggctgggtggccccagtgaagacggatcaatagcccatcctggctgtgagacctgctcggccgttgcttcctcatcagtaaaatgggagcattagcaatgtccccgctttgacctcctgcaggagcagggtgttggggtgggtggcgtgggcacatgggaatgtttggtaaatatcaactgctgctaataccacgacttttccttagctctgccctagaccacccggggttcctcctggactgcctcccctggcaggttcctttccctccactgagacccaagtgactcacataggcaaccgtggtggaggcagaggcaagctccccggtggccggagcccaccgccccatccccctcatcttcacctacctccacttgcctgctcagaatggggggttcagggtgcacagtgtcgattttggaatcaggagatgcagtgttttttttttttgttgtttttttttattaaaagaaagagtctcactctgtcacccaggccagagtgcagtggcttgatctcagttcactgcaacctccgcctcctgggttcaagtgattctcctgcctcagcctcctgagtagctgggattacaggcatgtgtcaccacgcccggctaatttttgtatatctttagtagagttggggtttcatcatattggccaggctggtcttgaactcccgacgggtgatctgcccgtctcggcctcccaaagtgttgggattacaggcatgagccaccaggagatgtagatttgagggccggttttggcacagctggactgtatcaactcgggcactcatcagastcagtttcctcatctgttatctgggtaatagagagctcctgtccaggacggttttgaggatggaaaggtgtccagtgtggctgaggaaaagagggctgtgatgtgtggaggtgacacaggcttagacagaaatkgagacgatatccagggcaatgccagggctccctggttcaccagctagccggcctacatgggctaggcgctctgcaccctgcctcccctgccccggtcctctgctyctggctgttatcccagctttttgttgcagcaacctggagggcttcctggaggagtttgctgacatctccaaggaagaccagatcaagaagctgcatgacctgctggggccgcacatgctcaggcggctcaaggctgacgtgttcaagaacatgccggccaagaccgagctcattgtccgggtggagctgagccagatgcagaagtgagtgatgggctgaccccggagcagcctgtgctcgccctttcccctgggctggtctcctgggtcgattcccaggtgggyggagggctcttcagcctcactgaggtctyggctaatgctttgcatacactttcttcgtggggcctcttctcaggttttagtgaccagagtttgggtcgcttgagtgctggcagtgtcccccagtcacttgcagggggactccaggccggtggcttcacctcttgggggtcccttgggtctctctrtaaatgggtgcttggccaccagcttccagccccactgcagagcagagagagccctcatggaggcgggtctgacccagcctgcctttcctcgtgccctgctgcaggaagtactacaagttcatcctcacacggaactttgaggcactgaactccaaggggggcgggaaccaagtatcgctgctcaacatcatgatggacctgaaaaagtgctgcaaccacccctacctcttccctgtggctgccgtggtaggtttccccrgccatcatggcagcttctccatgaccgccatggtaggtscctgtggccgccatggtaggtccctgtggccgctgtgataggttctcctggccattgtggcgatttctgtggctgtcatggtaggtttccctggccatcatggaaggttgcctgtggccactctggtaggtgctggggaacttacygtggaacccgctgctgtggtagggctggtgcggctgtgagccctgcctgggaacggggggcctggagccagggccgtgggacccamggtctaccccgcactgtggggcctggcctggctcgggtgtgggtctcatgttcagtgggcagacaggccatcaccccattgctcagcrcttgtctgttccctgcggcccctttggtgcagagtcagagaggagaggggagcccaccmatgccccacctcctgctgtgtctgcaggaggcccctgtcttgcccaatggctcctacgatggaagctccctggtcaagtcttcagggaagctcatgctgctacagaagatgctgaagaaactgcgggatgaggggcaccgtgtgctcatcttctcccaggtgcgctgcccctgcccacccccgccccggctccacaccccacagagagcatcctgccctgatgcttgggggcgcaaacttgctggcacccctcagggcccagtgccgttcccatgtgggtcatgtgactgtgtgtcaggggtcactcccccgtgccctggcataatgcrgctgaggagctcagaacacatttgccataaagagcaacatctccccacacctgcccttctggtctgcatgtccaggctggtaggacagcccctcctcccctgccctggccctctcccccgmagcctggcttctcattaaggtagggccctggggtgtggttgggaggagcccctctctccaataggccctgaggggccactggcacctggctttttggcttggaggcagggccgccggctcaggtgtgttcatttcttcctccatccctttgtttgcgtctgtcatagtcaggctctgtgctggcacatgggtgcagggaccagtgatctagtccctgtcctcaagctgctcagtctactgtgggagacagctcaagggacaggtacccgaccctgtggtcagctctgtgttggaggccacagtgatgatcctacagggtcatggggctaaaaatgctcctctcgtgggcccactgagccaggccccttgctcaaacccagagtctgggctatggctccttgtgcacaaacatcaactgaaagcagcgtccgcygcctgcagccccaggtcaccctgctgggctgcttcagcccgaagaatactggaaagcagggcaagtttgagaccaggggctgagccaaggagtgggctggagtggagatggacccacatccccccagtacctcggtaccarcacgagacgcaagtctgaycagaggccttgagataccaagtaatgggaaccacacagcttccagaaatgtgcacacagggcaagyracagagacggggccctcctgcccaaaatgagcctatgaaccccaattccaaacccatacaaaagtgaatgctgagacatcccccaaaacaataaatagaatccaaataagaaaataggggctgggcgcagtggctcaccctgtaatctcagcgacttgggaggttgaggcaggaggattgcttgagcccaggagttcagggttgcagtgagctgtgatcttgtcacttcactccagtctgagtgacagagcaagaccctgtctcttgagagagagagagagagagagagagagagaaaagaataggatagcctgaaaagactttacatagatgtgtttaggatcctcaaaaatgatggagtaattgacaccctaaaataaagaagaaattaagcaaaagcaggaagaactgaaataggaacaattggatagaaacatgcatgaaattgagataaaacatttcaacagactggacagactctgaacactgttgaagagaacattgataaattggaacctggtgctgaggcattttcccagaatgcaatgtacagagacaaagataaaacagggagaacatggaagacaccttgagatgctccaacaatcatccaattggagttgcagaagaaacagaaaaaatggtgaagaagttggatttgttgagagtttgcagacctggagagaaatgtgaggtctcagatctggagtgcattctggaatagcaagcaagataaatataaataaatgaacccgtagacacgttagaacctctaggtactttagacctagtacctacaaaataagggcagccagatcgttctcagacttcttaacaacaacaggtggcagagaccatggcaaaatctccggtgcactgagggaaaatgtgtgctgatagttttatatccagctaaactctctctygagaataaagggaattatacggggtcatgggagctcagaagggactgcctttcttttcttatggggaggagtgaaatcagggaagacatcacagaggtgatgtttatgttccctaggcagtaagggggtgggcattccaggaagagagtcaggtagtttggaatggctgggggctgtgaaggagcactcgtcctgcagcgccttgaatacagggcagtgagatggaacttaattctgtgtggtgggagcaggggaggctcatgtcagagccctgatttaggtaagtggctgtggggctaggcaggaggatggattggctccaaggggtgaggttggaagctttgttcttccccagagtcctgcattgggcctgcctgggtcccagctgtctccccacctagcaggcagctctctcctcccctgcctgtggcggggtccccgcccatggcccatggggccccttgctccttggcagttcctcacgtgcccgtctcccctgcagatgaccaagatgctggacctcctggaggacttcctggagtacgaaggctacaagtatgagcggattgatggtggcatcaccgggggcctccggcaggaggcaatcgacagattcaatggtacccccatcctgcccaagggttctgattgagactcctttttggcctcttctcccagncctggttcttagccaggtcacccagctggtgttgtgttgagcagcctcacaaacagctaaagacagcaggccagtccgagtttccaatgttaaaaggattcctcccatggaatcggagttctgaggggcccagtagataacacctgttgggaatggagttagacaatgagaaacgcagacggggcctctaatattgacgccaggtgagccccagttacaagtggtgttggacagagcctgccgtatggtgaatggtggcagaaggtacagagatgcacgtgctacctggggccacttccagaggcaggagagagtgaaagggctgggccacacatgatcaggctctttccccagagtcacccatgcttggtcttccctgcctgggaaggagaggcgagggtggaggtcaggagggtcttgccggtggagttcctcctgtagcaaaagaaacttctggagtgggaagcagtcggctgtaagcttcagtagcaagtttgcagcaaatagtaacaagctttgtttccctggggcgtcagcccttaggggctggggccacgctctccaaacgcccaaagcagtgattcctctcaaacacttgtgccagagagccaggaggaatagcaagttcagagtttcagggtctagacgtggcccagccacatgtggaagcaggagtggctgaagccctgggtgtgccaggggcctgtttgcagctccagtgggggctgtggtcagtcccaggtcactgaagggccctgagaggctgagaaccagccatcctgtgacagggttgcccagtggggtgggaccccaggtcccggagctgcgcccctgagttttcccgggctgccctggcagcatcggtgggctaagggaagccaggggtgggaagctgcggggacatgaaggactctgagctctctagggctctgcttgtacttgctggcggcttgcactttgttttttgctcatctggggtttgaaaattgacctcctcgttccagtgccctcccactgcacyagggctcagagctcgctgggggctaagtgggcttgggcaggcctcctctggctcccctgagtgcagctgtggccacccgtctctgatggggtctccggctttgtccttctctgccagggatctgttgctgcagttccttctctctgttctctcccccatcctttctgcccacccaaggtgtamccccccaaacactccyatctgctggcctctctttttcagcccccggggcccagcagttctgcttcctcctctcaacccgggcaggtggtctgggcatcaacctggccacggcrgacactgtcatcatctacgactcggactggaacccgcacaatgacatccaggtctgtgctgctgccgcccaccaccctcccagggggcctctcatcccgrgcctcaggcaggttctgtccttcatgcccttcttgccatcaccccctcacctatcctggtgctgtgggcctccctcccccgtggagtctcggccccaagaggggctctgggagtgagtggaagcttggcccccatccctccagctctgtccttgtccagaggaggaagcaggcttggagagggcaggggaagtgtcccagggcgcacagcagttcctagtggccactgatctggtctttcccatcatcctcaggaccaaggccgtggagggaggcaggaagagggagccctgggacccagaggggcacccattttgaagggggtggggagcagagagtggggcctgttggaggtggaggggaggataagatagtgcaaggggcagatggggctgtaaggaaggatggaagggctgtggggggaggggtatgggaatagagccaccctagtgtacctggccacccctctcgggcgctgggacacacacattgaatgcttacaaatgtaggggaacacatacaaattgatgtctcattcacatgtgtgtgcgcccatgcacatacacagatatacacggccacacccaggtcacctcatgtagggctgcacagagtctcaggcacttccttgtattatactgggcagattcagctccttgctgccctcagaaggtggctgcgtgtctccagcacatggtcttgtggtcccattagtggttcgctcacagggaaatgcagcctcctacctccccgtggcccccaygaagctctgtgtggcttcagttacacccagcacactggccgtatcatccctcacacactcttgcacacctgcagtcctgcctgcttccaatggctagaagcttttccactccaaacccagcctggcacccaggcttgtgggaggctccgcagtcagggagggagcccagctgcagtggtgggctccacacacctggacgcaccacacgcctttccctacacagtcatgcagcccattccatgctcttgagctcatgggtgtgatctcctccattgcctggagccctgggtgagccacgggtgctgaggtgcaggtctccccaggccttcagccgcgcccaccgcatcggccagaacaagaaggtgatgatctaccgcttcgtgactcgggcctcggtggaggagcgcatcacgcaggtggccaagcgcaagatgatgctcacccacctggtggtgcggcccggcctcggctccaagtcggggtccatgaccaagcaggagctggacgacatcctcaagttcggcacggaggaactcttcaaggacgacgtggagggtgggcctctgttccgagggagcgtggcaggggactggggtggcccggctgagacacccatccagggcttgcttgggtccctgcccgctccaacwcacagcctctcttctgcacccccsacctgtatctcctggctaggacagcccagggtggtgtctctgggcactgcccgccaaccctgcagccctctgtggtcctgcaccagtgctttccttctctgtctgacaggcatgatgtctcagggccagaggccggtcacacccatccctgatgtccagtcctccaaaggggggaacttggccgccagtgcaaagaagaagcacggtagcaccccgccaggtaggggccaacncagcccagcctcagctcctcctccgaccaggtggctgctcctgcagaggaggggttccctgacctgccctcacttgggcgtcctgggactgccaggtgggcggcgagtggggctgttacagcgcagtttcctctgtctggtcaccatgcctctcagctgcagcccctgytggggatgggaagggccattgttgggagtctgttcctgggaccccggggctggaccagggcagtctttgtcctcacactgcatttgcctgctccccaggtgacaacaaggacgtggaggacagcagtgtgatccactatgacgatgcggccatctccaagctgctggaccggaaccaggacgctacagatgacacggagctacagaacatgaacgagtacctgagctccttcaaggtggcgcagtacgtggtgcgcgaggaggacggcgtggtaaggtccccggcccgccctccatccgcarccccgccctccatccgcagccccgccccccactgtgtccacgccttccactgtgaccccgccctcccgccgcagccagccctccaagctgtgaccccgccctccagccgcagccccgccctccctgctgtgccccgcactccagcgtgtgctccgccctccaaccacgtgctccggcctctgcagggcggccctgtcgctccacccgcgggctcaggactagagacacaacagtgagggaagggacggaggcagcgctgagggcagtacagccacatgggccggccactgcccttgcacacatcagccgcctgctccgtggcgtcatcccggctccagtccagcttccccactctctgaagtgcaagctgatctgccaccccgttgcacagagccctgtccccggggtctggtttcagtccctacccagctgcaccctcccgccccttcctcagggcctgcatctcggccctgcacctggaccgccaacgttccaggacgscccacaattttctttttttttttttcttgaaatggagtctcgctctgtcgccccggctggagtgcagtggcgcagtatcagctcactgcaaccaacgcctcccaggtttaagtgattctcgtgcctcagctcccaagtagctgggattactggcatgcaccaccacgcctgtctratctttgtatttttagtagagatgggactttgccatgttggccaggctggttttgaactcctgacctcaggtgatctacctgcttcggcctcccaaagttctggggttaaggaatgagccaccacgcctggtccaccccacacttttctcccttctctaccgggcaaacccyagctgtccccgaagagctccttgtgggtctctcctggaggcctttccgtttcctcctctgctccccaccctccgtgcagacctggtgagcccatgaccttttcctttgaaaccaggagcctcctgagggcaggcaaggggragcttattcaactcagtacctcagtgcttgacaggaggcgaggaaatacttgctttgtgaatggatggatgaataagtaaatgattgactggataggggcagggagagaaaagctagctagggcyggggtgatcagagaagrcttcctggagtaggcaggccatcccattaatccttgagccctgagrgggcaaagggcaggtcaggtggaggcagcctgaggcttccgggagggcagagatggctcyacccatggaacccgtggtgctgcgtccccaggaggaggtggagcgggaaatcatcaagcaggaggagaacgtggaccccgactactgggagaagctgctgcggcaccactatgagcagcagcaggaggacctggcccgcaacctgggcaagggcaagcgcatccgcaagcaggtcaactacaacgatgcctcccaggaggaccagggtgcgtgccgggagggagggactggtgcccctcacccagaggcggagggtggggcaggattctgtcarggcatccctgtgcagaacccccgggaggtgcgggccgggagagctgggcgagtgtgccaggagggatgggtgtcccatacccagaggcggagggtggggcaggattctgtcagggcatccctgtgcagaacccccgggaggtgcgggccgggagagctgggcgagtgtgccaggagggatgggtgtcccatacccagaggtggagggtggggcaggattctgttggggcatccctgtgcaggacccccccgggaggtgggggccaggaacgctgggcggcgctggttggagctgggaggcagctttttggaggaaaggggactgggggcaggtgcagaggtgctgggtgtttgggggaacaaggtgtggctcagttcagtgacttcaccactgctcgtgacgtggccttgggcacgtcccttgcacacagtatgtgtaatgtgtgggtacacatggtacccttagtgtataacgtggtggtgttgggattactaaatgagcccacaggaagtatgtgggccattgtcactgcttttttatggagctggggtgcaggggctcggcgtggccctgggcatgcttgaacttgagggtgggctttgcttgtacagctcactccgtgcccctctgtctggccccctgcagagtggcaggatgagctctctgataaccagtcagaatattccattggctctgaggatgaggatgaggactttgaagagaggccggaagggcagagtgagtctcagtgttagtggtctgggctactgctgaggccatgtcaggggagctgatggcagcaggagcggggctggtctggggtcccgctgtccttggggatcaggaatctctgggctcccacctgaggaactgtggcgggctgctccccaggtggacgacgacaatcccggaggcagctgaagagtgacagggacaagcccctgcccccgcttctcgcccgagttggtggcaacatcgaggtggggcctgtctgttcccgcatctctttctgcccctgcttcctgctgcccytggggtatggaggagggctgggggactgccccgggtctcatgccaggtagaggcggagcttggacagaacttggtctggtcttcgccgtcagggtcctgccccaggtggaggcccctgccttctctgtgcccccttcctaccttctcctcctcccatgcttttcttcccccatcccagaatcctccacccccacccctctctgtcctgggctcatactcccacgctccactcgcccaggtgctgggcttcaatgcccgacagcggaaggcctttctgaacgccatcatgcgctggggcatgcccccgcaggacgccttcaactcccactggctggtgcgggaccttcgagggaagagcgagaaggagtttaggtaaaggggctaggtggtggcccagggtgtgaccacctgcccctgagtagggcagggtcctgcgggtgagccccacagagggcagcatttgcttccgccaggatgaggccgtctggaaagttcactgccacttggactttgggtggctagagtcctggtgccgggcagggctgatttgcaaacactgaccatccgcccctgcccaaaccagctggtgttatggcagcgaggaagatcccsgtcacccagggctgtcctaggaggtcccctygccagggaggccctctctgtcctttcccgggcctggcccaggcctgactaggaggtgggcgatggttgaagatcagccaggagttcccctggggtcctgccagccctctcagagggttcttgccggccccccactccctgagccccagtccccccccccccaccccagagcctatgtgtccctcttcatgcggcacctgtgtgagccgggggcggatggtgcagagaccttcgcagacggcgtgccccgggagggcctctccaggcagcacgtgctgacccgcatcggggtcatgtcactagttaggaagaaggtgggtgagtaactctctgtagggcccttcctggtggctgcctgggctcctggtgctgtcccttgtgggtcagtggtcagagaacaagtgcctggttcaggccacacagctgcccagggtccgagtcactccagagggactgacctggaaagcctttctgggtgaggggcctgtggggtggaggccaggatggtgggttacatacagttggaggacacacagagggtgggagggtgggcaggggagcttgtggtcaggaggggcctggcttggccagccttgggcggaggyagcagctaccccaagcctgtgacactttcagcccccctggctgccctgaggcccttagggctgagttgccaccactgccctccctctttccctyccaccttccctcccaccaccccaggttcaggagtttgagcatgtcaacgggaagtacagcaccccagacttgatccctgaggggcccgaggggaagaagycgggcgaggtgatctcctcggaccccaacacaccagtgcccgccagccctgcccacctcctgccagccccgctgggcctgccaggtctgtgggctgggcgggccggggagggcactggggtcatggaaagtggcaaggtcacagaaacccctagtctaacccacartcccacagaagacggcctctccttcccccaaagcctctgtttgctgaaatgtcactctacagagagttttccattttaatgacagttacgagatataatttatatacatactgcaaaattcactcttttaaaaaactggctgggcgcggtggctcacacctgttaatcacagcactttaggaggctgaggcggcaggatcacctgagctcaggagtttgagaccaacctggccaacatggtgaaaccccgtctctactaaaaatacaaaagattagccgggcatggtggcacgtgcctgtaatcccggctgctcgggaggctgaggcaggagaatcgcttgaacctgggaagcggaggttgcagtgagccaagatcacaccactgcactccagcctgrggggacaaagcaagactccatctcaaaaaaaaaaaagtactattcagtgatttctagtatattcgtagggtgtacaaccrtcgccactgcctaaggccggaatattttcattccccctgaaaaagaaaccctgtacccattagcagccactccttatccccccaccccaggcctgggcagccactaacctgcttcctgtttctggatttcgcaatgctggatggttcgtgtatatggcactgcacagtgcgtgggcctttctgtctggcktctgtcactcagcctgggggttccaggttcatccacattgcagcgtgcatcagtgcttcagtcattctgtcattctgccttatggctgataatgttttctttttctttctttcttcctttttttttttttgagatggagtttcgctcttgttgcccaggctggagtgcgatggagtgatctcggctcactgcaacctccgcctcccaggttcaagcgatcctgcctcagcttcccgagtagctgggattacaggtgcccgccaccacacctggctgatttttgtatttttagtagagacggggtttcgccatgttggccaggctggtcttgaattcctgacctcaggtgatccaccctcctcggcctcccaacgtgctgggattataggcgtgagccaccgcgcctggccgataacgttttcttgtatgaatttactgcattttgcttatccattgcgctgtcgatagattttggattgtttctactttttggctgctgtgaataatgctgctgtgttttatgtttttgcgtggacatacgttttgagttcttttgggcagatatctaggaatggaattgctgggccgtgtgataaccctgttttcccttttgagaaactactagactgttttccaaagcagctgtaccattttacattcctgctagtattgtgcgggagtcccaggttctccacgtcttcagcagtaattgttctctgccttcatggttctagctgtcctgggagcatgaggtggtgtctcactgtggttctgattggcatttccctgatgccaaggacgctgaatgttgttcggtgtgcgtattggctgtttgtagacttgtagaaatgtcttttcagattctttgcacacttaattgggtcatttgtgcccgtgtcactttggtgatctaggtatttatttgggtgaagcaaayacctgttaagtacttggtccgtcggttgggcctcacaggcctggggcggacatagctatcccatggtgatgggtgaggccaggccctgagaagctgcacctccaagcacaagggagcccttggaggtggacacatcttggtttgcttcttggctttggcctgaactctgtctaaccttgggcaagtcacmtaacctctgtgggcctccgctttcccggctgtgcccacctcccggggcttctcagagctgtgtaagtgaccagcactttgcagtgtgttggcggctggcttggcagggaggaaattcaccccctgtccagaggcacacaccagccagcccgcccgaaagctgggaccagagcgggtgtcgtggctcccaatctgggcctccatctgcctcacttccctgcctccagatgagcagccacggctgtgtgcggycccgtcctgacagcccctcactttggtcttactgggttcaaggtcctccaagcactcctgagtcaaaggyctggcctggcctctctgacttagccggggatcctgcttgtctctcctggaggtgcttggctgcagtggagcctcccgaaggccaagcccccatctctcctctctgccaccccactccctgccctactccttcccgtctgagcccacctgtctcagctctttcccttgatctttcagacaaaatggaagcccagctgggctacatggatgagaaagaccccggggcacagaagccaaggcagcccctggaagtccaggtgtggaacttgctggcgtctgggcctgtggtgtgtgtggggtggaggttgggtctggggaccttctcaggccctgtacagcgaggtggaacccaggcctcctggctcccttttcggggctctgaatcggcggggagcaggctaggagcaagcgacgggagccaggagactgggttcccagcccagcgcacgttccccgccctccgttcctggtgaggccccaggccttgtagttctcctggcttttcctctgcaggcccttccagccgccttggatagagtggagagtgaggacaagcacgagagcccagccagcaaggagagagcccgagaggagcggccagaggagacggagaaggccccgccctccccggagcagctgccgagaggttggggcttcttgcaggccacccaccccagtgccatgtctggcctcagcaggcctgggttcagagaagggcaggtggctgtacttccgctcatttctccctggcagagaggtagactccaaccctctgcaggccccctggtgaggggaggccaggagctcaggcctctatacatggacttaatggactttttttttttttggagaaagggtttcgctctgtcacccaggctggaatgcagtggtaccatctcggatcactgcaacatccgcctcccgggttcaagtgattcttgtgcctcagtctccctagtagctgggactacaggcgtgtaccaccacacccagctaatttttgtatttttagtagagacgagatttcatcatgttggtcaggatggtctcgatctcttgtagctgggactataggtgcataccaccacacccaactaatttttgtatttttaatagagactgggttttgccatgttggccaggctggtctcgatctcttgacctcgtgatccgcctgcctcggcctcccaaagtgctgggattacaggtgtgagccactgcgcccggccattttttttttttttttttttaatttttagtagagactgttggctgggctggtctcgacctcctgacctcaagtgatccacccacctyggcctcccacagtgttgggattgcaggcatgagccaccttgcccgttggtctttaacttttcttaccatacagagattgggggtgattgggctacttttttattagtgatttctgactcaattgcattgtggtctgaaaacatgagtctatatgaggttgttgaaacctgctctctggcctgatacggtcagattttgtaaatgatgtatgtgtgcttgaagaaaatgtctgttccctaattgctgggtttaaggttctaactatatgcattagggctgggcatggtggctcacacctgtaatcccagcactttgggaggctgaggcaggtgaattacctgaggtcaggagttcaaggccagcctggccaacatggcgaaacccagtctctattaaaaatacaaaaattagttgggtgtggtggcatgcacctgtagtcccagctactcaggagactgaggcaggagaattgcttgaacctgggaggcagaggttgcagtgagtggagatcgtgtcactgcactccagcctgggcracagagagggactcaatctcagaaaaaaaaaawawatatatatatataatacacacatatatacatatacacgtatatatatacgtatatatgtacgtacatacgtacgtatatacgcacatatgtacgtatgtacgcacgtatgtacgtacatatgtacctatatatgtacgtatatatacacacacgtatatatatatgcgcattaggtcagtagataatgcatgctaattatattgttcaagtttttaatatctttactagtatttggtttgctttgatcagtcagtttctgagagacttgtgttaaaatctctcattatgattatggattaatctctttcttataatgccagattttgcttcatatcatttgagactgggttgtcaggtgcatatttgttcaggtttttaatatttttcttgtgaagtgtgcttctaattattgtgtaataaccctcttatccctctttaaagtttttgcttaaaagtttatttttgggccaggtgcggtggctcatgccagtaatcccagcactttgggaggccgaggtgggcagatcacaaggtcaggagttcaagactatcctgtcgaacatggtgaaacccgtctctactaaaaatacaaaaaagttagccgggcatggtggcgagcgccagtagtcccagctacttgggaggctgaggtcgcaccactgcactccagcctgggtgacagagcgagattccgtctcaaaaaagaaaaaaaaagtttatttttgctgatttgggttgctctttcttttgtttagtatatatttgttacgcctttttctattccttttttttttttaagataacagctttatggtgatatagttaacatatcatacagttgagccatttaaagtataccattcaggtcgggcatggtagctcacacctgtaatcccagaactctgggaggctgaggtgggtggatcacctgaggtcaggagtttgagaccagcctggccgacatggtgaaaccctgtctctactaaaaatacaaaaatcagctgggcgtggtggtgggcacctgtaatcccagctactcaggaggctgaggcaggagaatcacttgaacctaggaggcagaggtcgcagtgagccgagatggcaccactgcactccagcctgggcaacaagatcgaaattctgtctcaaaaaaaaaaaagtaatgaagtataccatttgttatttttagtacatccagagttgtgcaaccatcaccattatctaattccagaacatttaatcacttcaaaaataaattcttcttacccattggtaatcactccccatttcttcctcttcctcccagcccctggcaatcacttctgtcctatggactggcctattctgaacatttcataccaatggaataatgcagtactttggccctttgtgtgtcttctttcacttagcatagtgtttttaaagttcatctatgttgtggaatatattagtacttcattcctttttttttttttttttttttgagacagggtcttgctctatcacccaggctggagtgcagtggcatgatcttggcttaactacagccttgaccccctgggtgcaagcgatctttccacctcagcctcccaagtagctgggactacaggtgcacatgctaacacgcccrgctaatttttgtattctttgtagagacggggttttgccatgttgcccaggctggtcttgaacccctggactcaagcaatcctcccaccttgacctcccaaagtgctgggattacaggcagtacttcatttctttttatgcccaaataatattccattgtatggatctactatgttttgttttgtttatccattcatagtgatacacatttgagttgtttccactttttggctactgtacacatttgtgtacacatttttttgtgtgagtctaggttttcagttcttttgggtatatatctaggagtagaactgctggatcatatggtaattctctgtaccattttgagaaactgctgaattgttttccatgtgtattgcatcagttcacattcytaccagcatgtgtgagggttccagtttcttcacatacttgccaatacctgttattatctgtctttttgattatagtcaccctagtgggtgagaagtggtatctcattgtcattttgatttgagtttactttgtgcataaagatgttgaatattttttcatgtgattatggcttatttgtgtataatttgttgaagaaatgtcctttcagatcctttgtctactttaaaattggatttttttaaattattgaattgtaagagttctttttaaattaattaatcaatacttttagagacagggccttactatgttgtccaggagggctttgaagtcctgggcccaagtaattctctagtattagacttttgagtagctaggatcacaggygtgtaccactgtgcctggcttgtatgagttctttatatagatgcatgttcctcatcagatatatgatttacaaatattttctttcatttcttcacttttaatctctttgtaatgttttaggtctatcttttgtagacggtgtataggggattcatcatttaaaatctaattatagggtccctatcttttagctggcaagtttaatctctttacatttgttgtaataactagatatgtggatggaattctgttatcttattttgtactttatatattacccttctcttttctccttttttctcttttcmtgccatctcttggattgatcaaattttctttatatctcctcttttccccctcaactcatttggaaggtttatagtcaatttcattctgtactcttaacatttttaacatgtatacccctgagtaatatgaggactttagatagctttagctctaactcacttccctttcatctgccacgatgctgttgcccagtattttagtttcagtttgtttttactttcccaaatttgttgttatgcttatttctaaatttttaatccttttttagatcttctcacattcttaccagtttgtgtttgcctatttgttcatcattgcttcattcaaagtccttcctaaagtacacctttaatggtgctttcagcaatttttttgggaatggtaaattctctcattgttatttttcttttactcttgaatagttagtacaattgaagatgggatagggatcttccctcagcactttgcagatattcttcctttttttatttggcattcattatgctgagaaggctgctgagaagctgagaaggctgctgttggtgtaattgctgctcctgtctaggaagtttgtcatttctatcttttctcacattgaaagactgctttgaagacattctctttgtctttggtgatatgtagcttcactacaatggagggtattttttgttttgtttttagagtgaagtttttgtttatcttgtgtgtgactcactgtgattcttaaagctgaatatttatgtcctgcatcaattgtgggaaaattctcagtcattctctctttgaatattttctttgccctcattatgtttattttgtccttctggaattcctattactcattgattggttcattcatccaacaaacatatatatacacacatgcatatatatatatattttgagcctgctgagtgtcagatgctgtcccaggcactgaggacacaagcaatgaaccaaaacagctgaaagcttcattccgtggagtttgtattccactggggaacacaggcaatycacaataaacagaaatacgtgttgttcaaccacagactccaaatgctctaaagaagaaagcagagtacaaggttagcaaaagatgggggctgataagttttcatatcttttgcttcttttttgttatctatttctctgccaggctttttgagtaatcttcagatccagcttccatgtatattttctttgcacagctgttttttaaaaccttcccagttgtattattttgcatggctgtgtcacaaattactgcaaacttagtggcttaaaacagcactcaccatgagctcacagttgtgtgggtctgatgcctggcgtggtgtagctgggtgttctgctcaggatatcacaaggttcaggacatcaaagtatcgagtgggttgagttctcatctggaggccctggggaaaagtccacatccatgctcactccttgttgttggcagaattcagttccttgaggctggaggactgaggtcccatttccttgctggctgtcagctgggtccgttttcagcacctggaagccaccacattcctgccatgtagcctcgtgtgtcttcaagccagcagtggtgaacagaaaccctcccgtgcttcgcatccttgacttccttttctgtgaccagccagagaaaagggctcgtgtggtcaggttaggcctactcaggtcatctccctgttttaaggtcaccygtgccgcaaaacggaacctgctctggggagtcgagtttgtcctcttcaccttccaggggatcttgcagggcgtggacaccaagggccggaagtcttggagcccatgttggaattctgcaattaaattctgcaattaaaatgttaatgattgtgtgtttcctttcttttttttttttttgagacagagtctctctcccacctcagcctcccaagtagctgggactacaggcacccgccaccacgcccggctaacgaagtctggctaattttttgtatttttagtagagacagggtttcactgtgttagccaggatggtctcgatctcctgatctcgtgatctgcccgcctcggcctcccaaagtgctgggattacaggcgtgagccaccgcgcctgccccccccttttttttttttgagatggagtctcgctctgtcgcccaggctggagtgcagtggtgcaatctcggctcactgtagcctctgcttcccgggttcaagtgattctcctgcctcagcctcctgagtagctgggattacaggtgcctgccaccacacctgcctaatttttgtatttttagtagagacaggatttcaccatgttggtcaggctggtctcaaactcctgacctcaagtgatccacccacatttctagaaattttatgttttttttctagttttgagggagtcttattctttccctgtggattctcttccttctttttcttttttctctgtctttggtcaccctagacatatttattttagagcaagctttttcaacctgtgtggtccgtgggacaaatgtggcccaggatggctttgaatgtggcccaacacgaattcataaactttcttaaaacattatgagattttttttgtgatatatatatatatcacaaaaaaatgtgtgtgtgtgtgtttatgtgtatatatatataagctcatcagctgtcatcagtgtttagtgtattttatgtgtggcccaagacggttcttcttccagtgtggcccagggaagccgaaagattggacacctctgtttgagagtctctgacattgtcctgttagccccaggcgcttgtctgcttcctgtgcgtcggctggtgggggatcattgttttctgggtttagattgggtgcatcctcatcaggaattgtgattttttttttttttgagacggagtctcactctgtcacccaggctggagtgcagtggcgtgatctcggctcactgcaacctctgcctcccgggttcaagcgattctcctgcctcaacctcccgagtagctaggattacaggcacgtgccaccacacctggctaatttttaaaaaatatttttggtagagacggggtttcaccatattggtcaggctggtctcgaactcctgaccttgtgatcctccggcctyggcctcccaaagtgctaggattacaggcgtgagccaccgcgcccggcctggattgtggtttttatctgcaggagctccgtgtcctctggggagtgggagcatccctccccttttgtttctggaggctcaggccgggaggtttcatgggcggtgtccctctgggagcagctttatgatgctgtctctgccttgggtggtccagttcatatcccacacccacgaggacaaggcgttgggtgtgggttcctcactggagwccttcttttccttgatcctgtggtggagacaggccatctcactcccgtggccagtggtgagaactttccttcagagaccacggtgttggaccgtgttggcatcattccagttctctgcatcttttgggcttgaggcctcccctgtcctgcctgggtgctgagacacagcyccaagttccaagctctccaggcttcttcctggtgtctcatcaccccaacctggggcccctggacaccagctcctgcttcctcaccttcagtttccccttccttcctggcacccggtgatttccttctcttcttgggaactcatcttctgtgtgctgtttttttttgaaacagcgtcttgctctgtcactcaggctggagtgcagtggcgccatctcggctcatgggagcctttatctcctcggctcaagcgaccctcccacctcagcttcctgaacaggtgggaccacaggcgcatggcgccaagcccagctaagttgttgtattttttgtagagatgagatttcactatgttgccaggctggtcttgaactcctggtctgaagtgatcctcctgcctcggcctcccaaaatactgggattacagcatgggccactgcacctggccgaggagagctctttttggtggcacctgttggactctgcggaacatattgatggatagggttccatgggtggaaagccacgagcccagagtcctctgtgttttctgggaccccaccccatgccgcgaaccctctttttcttgcagaggaggtgcttcctgagaaggagaagatcctggacaagctggagctgagcttgatccacagcagaggggacagttccgaactcaggccaggtctggggctcttctgtgttctctacctgtgccccatggtcccttgagggtgccctctggaccctgttcagcctcccacagtctcccaggcgcygtccccttggccccaggcctgattggagctggcaggtgggagcctggattcaccagcccctcacagccaatgccggggacagcctctcccctactctctcctgagccctgctgtgcccttgccgctaagagagaggagagctggtcatagagcctggcctgggggatttggggctcagctggaagctttgcatacctctaggccctggaatgttctggaacagttgtcctcagatcagccccctcaggcagctctgtctttgaacttgaactgtacttttcacagcgctctcctgtcctactcctgggtggtcctgatgtggtcggggaggagcactaggacctggagctaagcctccctgcccaggacagagagagaggccgttggcttgtttaagacccttctgggcagcgagtcccctgaggacaagaggatgttttctacttgcctcctgggtcccccgtgcttggcagagagaggccgctgggcactgctttttggatggatggatgaatgaatgtgatctgtccccggcagatgacaccaaggctgaggagaaggagcccattgaaacacagcaaaatggtgacaaagaggaagatgacgaggggaagaaggaggacaagaaggggaaattcaagttcatgttcaacatcgcggacgggggcttcacgggtattggggttgggggttgggcagagagctgaggcttcctgactgtgggtcccaggagtctagaccagtggttaactttatactagagtgtgactggttgatggaagtccatcgtataacctttcttagccaccctggaacactggacctctgggggtggaggcagtggcaagtagggagggagcggctctccaagcctgcctgtgcktgagagctggggcacttctcaccctgctcaccttggcttgtttcccagagttgcacacgctgtggcagaacgaggagcgggctgctgtatcctctgggaaaatctacgacatctggcaccggcgccatgactactggctgctggcgggcatcgtgacgtatccttggccaggccgggctgggcagggacttgcccgttcctccgtggacctcggggagagccctctgagagctccgggggaagccttcctcgttcttcctcaatcttcctcacttctggcggtggctagaaatcctcggcattgctgtgtcgcccgctccccgccgctgtcatcccggcttcttccttatgtgtctctgtctgggtccacattgctctctctttttttttttttttttgagatagagtttcactctgtcacccaggctggagtgtagcagcttgatctcggctcactgcaactgctgcctcccgggttcaagcgattctcctgcctcagcctcctgagtagctgggattacaggtgtgccccaccacacctggctaatttttgtatttttagtagagacggggtttcaccatgttggctaggctggtctcgaactcctgacctcaagtgatccacccaccttggcctcccaaagtgctgagattacaggcgtcagccaccacacccggcctttttctttttyttttttttttgagatggagtctcgctctgtggcctaggctgaagtgcagtggtgcgatctcagctcactgcaacctctgcctcctgggttcaagtgattcttctgcctcagcctcctgagtagctgggactacaggcatgcaccaccactcccagctagtttttgtaattttagtagagacggggtttcgccttgttggccaggctggtctcgagctcctggcctcaagtgatctgcccaccttggcctcccaaaatgctgggattacaggcgcgagccaccatgcctggccccaaattttcctcttcttacaagcatcccagtcattgagtttagggcccaccctagtccagcatgaccctttcttaacttcattacatctgcaaatactctatttccgaaaaaggttcccattcacaggcactgggggcaagacttaaacgtatgcaccccaggttgttggggtgaagagttaaccctctgaagccccggggctgtgtctggtgcacccagggcacctgtcagtgtctgctgatactgtcactgttgtgtcatcaatatgttcctcgtgcagctgggcttaaggacttgcctgagagcgtacagccagaatgccgacccccgggctggcccctccccctccctgagctgcctccccctacggccccaccacttctaacggccaggtttgcccttaatggtgccccacccaggcacggctacgcccgctggcaggacatccagaatgacccacggtacatgatcctcaacgagcccttcaagtctgaggtccacaagggcaactacctggagatgaagaacaagttcctggcccgcaggtttaaggtctgtcttctgaagggccagggctgcacggggcagggagggacggtgtcaggaggaccctcgcaaaggcaaaggaattagagagcagcaacccctccccrtgtacctgggtcacgctgccacgaagcagcagtatgtccatcaactaacagtggtggatccttgctctggccctggccccactgggaagtatctgccgccttggggtgttggggtacagagaacccagcttggtgacagctccaagggttggccaccaccaggccagggtgggcagcagatggcagtacgtcctctttccctcctttctgccgggagccttggcctggggtgggcgctggtggagcacggagggtagccattcagcgggaggggccgggccgacgctgcgccccgcccccagctgctggagcaggcgttggtcattgaggagcagctccggagggccgcgtacctgaacatgacgcaggaccccaaccaccccgccatggccctcaacgcccgcctggctgaagtggagtgcctcgccgagagccaccagcacctgtccaaggagtcccttgctgggaacaagcctgccaatgccgtcctgcacaagggtgagcaagtcctgccccccacggtgcagccccccgcccttcctcctgcccagcgagcgctcttggctgtagatgagggcactgatggggtaggggctggggacagatgtcagcccagagggcggtggacttctgggccaagatggaacagtcctgtcatcagaccccttatctcccctgcagggaaactgaggctgcttgcttctccagcctgtttctcaagcctgctctgtgcgggccccggcccgggctagtgacacagaaaaccacgaaactgtaaaggcttctgagtcctgacagcgtgacttaaatgcactgtgtctttagcccgggcaatacccatcagcctggagccttctccttggccccgtgtgggaagggaagtagtttgcccaagatctcccaggattcagagctttggtgctggctgcacatctctgcctgtggtcacagggcacacttctgccctcggggctcccggctggttgggggaggggtggccctgtggtgagagttgctggacccctccctgtgccctgcagccctccctggtgtactctgatcctgtgcccagtagggcctggggctgcaggtctccctgagaactcttaggagggaagcccagcgtcaggcagcgcttctggctggctcgtctgcagcccgtgggcccttgcccagcccagaggggctcctgggaggagttctttggaagctcctgctgtgtccccacttggcagtgctgcctgcagcttgggagggcctggtgcagggcaccccctggtgcccggttctgggcaagtgcagtcatacacccttgcaaataagccccagctctcgggctacctcccctggcacagcccttcatccctccatccctccatgcctccatccttccacccctccatcatccctccatgcctccgtccttccacccctccatccctctattctttcacccctcaatccctcatcccttatccctccatccttccacacctccatccttccatccctccataattcttccatgcctccaaccctccatccctctgtctctccatcatccctccttcccttcatcatccctccattcctccatccttccacccctccatccttccatccttccattatccctccatgcctctgtccttccactccatccctcatccctctgtcatccttcatccctccatccttccacccctccatccctccattatcccttcatcatacctccatcccttcatccttccatctctccgtcatcccttcatcatctccatcattgcttcatccctccatcatccttccattctccctccatccttccacccccatcccccatctctccatcatctctccatccttccatctctccatctctctacccgtccatccctccatcatcccttcgtccttccattcctccatccctccattatcccttcatcataccttcatcccttcatccctccgtctctccatcttccctctatcatctctccatcatcactccatccctctatcatccttccgtcatctctccatccctccatccttccacccgtccatctctccatcatccctccatctctccacccctccaaccctccatcatccctccatctttccacccctccatcattcctccatccctccatcatccctctatgcctccatgtctccaccatccctccatcatccctccatctctccatcatccctccatccctccatccctccatcccttcacccctccatcacccatccctccaccgtcccttcatccctccatcccccatctctccatcatccctccatccttccatccctccatcatcccgtccctccaccttccttccatccttccatcttccattatccctccatctctccatccttccacccctccatccctccatcatccctccatccctccatctctccattatccttcatcatccctccatccctccattattcctccatcatcccttcattcttccatcatccctccatccctccatcatccctccatctctccatcatccatcatccctcatccctccatcatccctccatctctccatcatccctccatccctatattatccctccatcatcccttcatttttccatcatcccttcatccctccatcatcgcttcatccctatatccctttatctatccatcatcccttcatcatccctacatccctttatctctccatcatcccttcattatccctccatccctccatctctccaccgctccatccctccatcgtccctccatctatccatcatcccttcatcatccctccatccctccattatccctccctcatcccttcattcctccatcatccctccatccctccatttctccacccctccattcctccatcatccctccatctctccatcattccttcattatccctccatccctccaacatccaaccatcatcctttcatcatccctccatctctccactccgccatcccaccatcatccctccatctctccatcatcccttcattatccctccatccctccatcatccctccatccctccatcatccctccatccctccatcttcccccatccctccaycttccctccatccctccatcttcgctccattatccctacattatccctccatccctccgtccttccacccctccattcgtccgtccttccacccctccatcatccttccatcgctccatcattcctccatccctccatcttccctccattatccctccatcatccctccatcatccctccatccttccacccctccatccttccacccctccacccctcctctcctccatccctccacccctccacccctccatccctccatccttccatccctccatccttccactgctccacccctccacccctccacccctccatccctccatccttccactcctccatccctccacccctccatccctgcatcctaccatccctccgcctcccaccacagtcctgaaccagctggaggagctgctgagcgacatgaaggccgacgtgacccggctgccatccatgctgtcccgcatccccccggtggccgcccggctgcagatgtcggagcgcagcatcctgagccgcctgaccaaccgcgccggggaccccaccatccagcaggtcaggctcggcctgtgtgccccggcccgagccccctggcgtgcccctgggtggaggctgggtggggggcctgagaccacctgtgaagctgagtccttgcctccagggcgctttcggctcctcccagatgtacagcaacaactttgggcccaacttccggggccctggaccgggagggattgtcaactacaaccagatgcccctggggccctatgtgaccggtaggtgcccgtccgctccgggcagcatgcacacgggtgcccgccgggcccggcctgcctgctgctgccaacgtcaggcaagcccggctctcctctttttttgacagatatctagccgtcctcgagacttccctgtgttgcagygctcatttccagctgaggtgagggctgctgggtgctgtgttcctccccgccaccccattgctggcaaaccaggcctggccacagtcagccctgcccctgcacttgactcccgtccctaagtcctggagcttttactgcctccggcggctttgagagccacccacctgcctggagcccctctaccttgcccccttggccctgggaccaccttgtggccagcgtgtctgtccactgggaggctggggtggcaggacatgaaggggtcggtggacttgggtgagctcctgtgtgtgcacatgtgttctcatttgcacacatgttcccagcggaagtcagagactgctgcccccgcctggagccctgtcctgcccctgctgtcctgctggtggcagacatcacatcttgtcttacaccctcacttcctgcccaggaccaggagggtggctgagggttttgtgggggctattggccaggagagggggcttatttcagagaaactgccagttcattctggtcttctctggggccaccagcctccactacgctgtgtctgtccctgtgggaaccgtgtcttgctggaggaggctccagaggggcttcctggctggctgcccctgcccactgctgcttcctgggtgctctcggcactctgggtgtagctcatggcctggcccggcagcctgtggctgggaggtcatggctggggggcaccccgatcatagttggttgtgataggtggagaagcagctacaggctgttgggtgccaccctgatgccccctataactgcccacctgcttaacccactgatttgcgttttgcagccacgcctgccgggccacctgcccgacccacatgggagagaaaagctgccacctttttaggagccagcrccaccttgggacaaaaagggaaacctagtaatgccatcacatggaggacgaggcccagctcagctgggccagagcccagaagtgccacctcatcataattcaagtgttcttccacacagcgttgcccccacaaccacgcyggacgtgccccctcgccaccttttccagacgacttcttagaagagatttcatttatttgtacatcttttgcactttcctattgaagacttgaacacgtttgtcttgataaaagttggatgacgtatggaagattcgaacctgcagcactgatgtctctttaccgatgggttccagacccaaggtagtcctggcactgccctgtggactcagcccagctggggaggacatggcgcccggtgccctaggagccctcagtgtcccctacctgacctgtctgcacctgtgtgacagccccttctgatttggccccctgcccgcttggagcctcccagcaccagacagggcaggtttggggagccgctgtccagccctatggtgagaccctggctgacatttcccctccttcctgccaaggctggaggccgccaggtgtttgctctctccttgtggggaggtggatcctctgccagcaggtgtctgtccccggcccagcgcatcttgaaggccctggactctgttaccagtggggggcctgtggccccggctcttcacagcaggcagaagcgtatgatcccagggagggtgggctggggggggbscagcacttgcctcggagccactgctgcgttgggtttgccttctgccagaggtgtggttaagggcagtgatagctgcgccccagcaaggagggtcatgggccctgagctggcccaggagaccctggccccctgccctgtgccctgggatgcctaccctgcccacctccggaggtggaaccgggctgcccctgggggcctggacttgtcccattcccctgtccctggaaaggccttcccgggggctttttgcctgaggctgcactcttggaaggcgtggggagagttctgcctggagggggactggacccagtgccctctgcagacccctcccagccgcagcaccaagggcttgctgccttgtttcctgccaggagcgccctgacatcccaaaaccatcttcccacatgtgggttgttggaatcccacccactcccccggaccctgcccctccaagttggggacggagatggggagcaggtcaggccctccctaggcctgtttgtgtgtgatccttctcctggccccaggtcgacctggaaggcgtttctgagtcttgtactgggaccttcccagggaaggtgccttggggtgcagaatcctgggaatgttaggaaagggctgcgtgaaaaacccagctgggcctggggtggaggtgcacacgggctggggctcagctccttggagagggcctgcctgggactgagggggccagggctgggtcaggattcaccagcttgtgttgcagacactggagcaattgcctggccctccctaagccctatatgcctcactcataatgaggctgtctctgaaccccggagggcgggacctacaagtccttcctcttggcgcattcccacactccagtctggatccaggtctgcaaggccagcccgaccctgacactgcacgtgggcgtagtggggagcaccctggagtggagatgattgtcagcgggctcacatgttatggttcatccacatgcgtgttgtgtgctctgcggtgcctcctggcaaagggtcctggctcgggtcagaagctcactcccgtgccctcgtccccaaacaagcagtggcaagcactggggttggccctcgttgggagcagtgcccaccttccttggcccacagcagataggtcccgagcagcaggactggaggcctgtggcggtcagggcaggggtctgtgtctccaccccaagggctgatggtccctcccctgtgcgccttcctctcaggcaggcttgctctgtcccttcctctctgcttccctcccaggcctcgccagggctcccttctcctctgcctggttagactcgggcacccaggaaagcctggccagggctcctttgggcctgggccccctgcactgcctggtccagaaggggtggtgctgtccgtggccagcaccccggggcccgggaggggtgggctactagagtcagagcgggtttggggctgaccagtttgggagaggagaaaagatctgagaatgtccttcttggtttgtcagtcatctctgccaaaagtggtgatggtggtgtccgtatgtttggcgtctttgggctgggtttggtttttgctgctggtagaatcagggtcctcgggcatgaacgygagcccaaagtgccagtctgcgattggaaatttccagccactttaagccagtgctgagtagggcttctgcagagccatgtttgagccaaggtcttggaaggcattgccccatgggctcaggtgactcggggtggagtgagcacgtctgcagggccctctcatacacgcctgaggcagaagcagcgtcccccgtgaaagccaccttccgaagctcctgcgttttttgcaaacttggcttcccccaggggcaggctggactttccctgccccctatgattgaagtcctcctgcttttgggggctgccttcccagagtcccccgggtgctcccctgccgaggtcaggagctgaccaagccttggcccggtgacamctgcagccctcactcctgtcatcccaggacacttgaggcccaaggaggtggagtggagagtgggctcgggtacatgggagccagaagccagatggacttggtcaagtgtcggtcacttggagcctccagtgtgcgtcagggtctgtgggcaggggacagggcgtgggtgggggccgaggctggcacgcccctctgccctcaccgtcttggtgacctggcctcggcccctcccccaagtctcttctgtgcaaggcccgcctcggcctcggcagctggttcctgtcctgttttctgtgtctgaaagtttacaggttgtggtgcatcagcccaaactcactggcgttgtgttttttttttctttaattttcagattttttttttaaacaaagtatttttttaggtgcgataacccagaaagggcccgttgggtgtgtgtgtgtgtcctgaactcctcaagcagcgattggagcccaagcacccctggagaggaagggagggtccccactggcccgtggggtctgagttcaggggtgtggagggagcagactccaccggcccaggcccagctaagagggggccgacccctttccccaggcacagccccaggctggcaaagggagggccctgggctgggtgcagggcgcgccaggagtcccagccagggtggccccggcgggggcgggtccagctttggaagccaggctcccctgtgagccgtggcttgtctggtcttcgcccacgggaggctggacagaggctgtagccaacacaatcacctttactttgtactctgtgtgtatgttttggttttctgtgttttaataaatcctttgggaaaggatttaatcagaggctttttctttttaagattcaagatttagaatgggggtgggggctggggccagggaggagtggtggggggtgggggcgtgtccggaagccttctcttgcctgggatggtcatttcacgggtgcaggggctcactgggaaggaggggagcccgaaacaggggtgtgctggggtgaggcccctctcacctgtaccccaaacacataccatgagagcttccccaggcctggacctctgtccttatgagaacagcagccagccaggtccccagagggacagcagcctcccagcaagcagctttgggccctcagagttggtgaaagagaatgtgtgtgttgggggcggcaggggaggcacgcaccctcccttggctgaatcgcttgggagagatgggggacaggtcttctgaccaccctgtccccattctctgtccccgctctctctccacgggccctttccaacccacctgcccttggctgcaggctccggtttgggggatgccccaggccctgctgctggcagccttttcctcccctcccgtgtcaccctggcccagccctgaccctgaggaaatgagaggagcaaaaagtcacagagaccgatgggtttgggctttatttattttgtcattccataaatacggtggctgtgtcgcggtctgagtctcgtttggaagctcgaggcataggacagtctctgcctgggtagggaatgcagttagctgaggaaccacggtaggtttaaaaaaaaagactcggggagagaaaaagcacattatttacatgactggacaaggacagaaggtgggaggaagcccctgtcactccttgggacctgggatctgagcacaaagctgagtgggaaacagtgggggctccgaagcgcccagcagggccagcgccctcctttctagaccccgactgcccttggtcttctgccctttcttggatggtcctacccaataccccctcccgagaggggggacctggccctaggaggcagagccccctcacatcctccctgtagatgggtgtggagcaagcaggacatccaggaaccaggtcgtggaaagagctgcgccagaggctgactgcatcctgacactggggcctggcctctctgtgtttggcaaacccgcagccttcggggggctcagctgccccaggtgtgcctcgcattaagcagcagtgcccaccctgggcaccacctcgcgctggtccctcttccaacagtgggtggggctgggtggcagtggggatggggccagccaccctccctgacggcgagggtgggccacctgccctctggcaccattggccactgcaggaccctgtccgggaaggaagcaggcgacccccacctgggcccagggccataggctgggacctccgttgggaagggacttccccaccccacactcacagggctgcttctggtgaagcaggcagcaggactgagtggagacccccgggacttggtctatgaggaggggcaagggttctaggcgccaggggcagcatgaaggggggtcggtaatagcagaagctgatccccctcctcccctcgccccagcctctccccgctggcctttctgactttcacagtttcccaggccttggcccggccaggactggacagcaggctcccgcaggacggcagggtggagccttctggaatagtggctcctccaggggcaaagcgggaacagaggtgcctgcactgagggtgcgccctgggggcaggagacacaggcttccctatggagctagctggcgaggggtgggggtggcttcagtggagccctgccccgcgtggtctgcaaagcctgggtactgcttgggacacaggcctgggcctgtaggtggcaccccgcacctgcagacttactggcatcccttgccctccggcccaagctgcacgggggcgtcactctggcctgtcctgccctctctcccctctgcccagcctgtcccaggtgtcaggcagtgggaggggctaaccagccctgcccgtctttccagggagaggttccctgaggtcttttcctacattgtgggggtgctgtgggggtgcagcccccaagtcatgggcacagaaaaccccaaagacccttccttactgaaagggtccaagcatgcgctccacaaaacccaagcccaccagctcggtgcagagcagcggcctgggctggcgggcggctttagagaaagtctacaggggccgagaggagtgcatccttgtgcacagggccggcccctgctgccacttgccgtggtgtggccagcagccaccgtgcagctaggagcacatgaccacagggccttccggggccaggacagaggggtggccagacagaggggcctgccccactgggacccctcccaagcgctccgggcctcactggcatgaggctcatcattggtgtgtaggaggaagacggtgggaggctgagctagaaatcacaccgctacgctttttgtggctcccaaactgcagagtcaatccccctggggtccctgcccctgccagcaagggtgggggtgggtgggggtcaagggccagctcgagcttggtaggcatggcccctgccgggacccagtggggcaggttggagcagaaaaggatgggagaggaatctgtggtcaggccccagattcctggagcccttggaaagtgggaggtggaggaagacccccagtggggaggccctgccccagcaaccaaggccctggcagaaggggcccctcgatgggccagacccctttcccctctccccctacaccaagtggggattctcagcagaggagaggccggccctgcccgccccaaggacccaaccaggccttggyctggccttgactttgggaaccttggaaatctttgggccttgactttgggaatcttggctgtggctgggagaaagctgggtggtcttggaggatgagcagaggtgacaggcttgggtgggaccgtttgaacatccttcctaaccagtgccttcccc

SEQ ID NO: 95080 - DNA, 57917 bp, Homo sapiens
gactcactgcaacctccgcctcctgggtccatgccattctcctgcctcagcctcctgagtagctgggactacaggtgcctgccaccacgcccggctaattttttttttttttttaatttttagtagagacggggtttcaccatgttagccaggatggtctcgatttcctgacctcgtgatctgcctgcctcagcctcccaaagtgctgggattacaggcgtgagccaccgcgcccggccaaaaaaaatttttaatgaaacggggtcagaaaattaaaattttccttctctacacaacctccccaaagaaaacacaaggcgacgccagttaagttcaatgccctaaaaaagtctccgtattccacctattcattccgccctccatcgtcgtatttttaaaagaaacatctaatattttaaaaataggaaaaatagaaaactgctttccaggctgggcacagtggctcatgcccgtaagcccagcactttgggaggctgagatggagatgggcagatcacttgaggtcaggagttcgagaccagcctggccaacatggcgaaacctcatctctactaaaaatacaaaagttagctgggcgtggtggtgtacatctgtaatcccagctactaatgaagctgaggcatgagaattgcttgaaccctagaggcagaggttgtagtgagccaagattgtgccactgcactccagcctaggcaactgagtgacactctgtctcaaaaaaaaaagaaaaaaaaaaaaaagaaaaaaaggaaactgcttttcacccttggactggtaaactctgtcaggcgtctagactaggctggggcttggataggtaatgggaaccactagtagagccagaggtgaacatataacaatcaccatagcactcatagatgggaactacacacttaaaatgactgcttgcccattttacagatgaggggactgaagctcagagagttgccaaggactgagacccaagtatcctgactccaaagaccaagtgttcatctaccttaccccaggatctaccacgagagttaaactggtggctttggggaagaaggatgagcccaacctagcttcagctgactgccctctttcaacttgtccctgctcctcccacccttctccctccacacacacatttaatgcagcttctaacatgtactgataacattattaccttctcttcagggaaattctgagaatgctcttgttatttaaaaagttgataaattctgtccatttgcagtcatagtgttgtatagtaccttatttagagttgtgagtatttatctgttatagaagaactgccgtatacatccttaagtcacggtaggaaatattccaaattagaacatccactccagaagcttaaagtttccccaaataaatcttataatagcatcacgttgccaaggtccccagaaatcttctctgtggaaggttagcaccctgtatcccagcaaatcaacaatgtggctttcctgtctctgactttaggcctcatttgatgacttgcaggttcccaaaaggcctcacccctgatattaagccaaagaccacagacaacaaggtcttcttgattctatagtcttgtatcttcattctactctaaataattagctctgtgtgtgtgtgtgtagtgtgtgtgtagtgtgtgtgtgtgcgggtgtgtgtgcctatgccctttgaattgtcatcaggtgacctggggaccagggaaggttgacctgaacatgggagtctgcccacatatccctttcacagacgtccccttctcaatacttctatggctgtattggaaagcctggcaaaaatggctctgccattaccttcctgcgtggcctttagcaagacactccgcttttctgggcctgtttcctctacagatacagaatagggcaattagactaagtgtggataggaaaggatgagcagctgggaaggaatctctgttaccctcttcctccggcttgctttctctaatggtcagatagatttctagcccccaactcctactcaggagactcacagaaggatgttcagggatttctgtgttttccattcttatttctaaggccttgaagggcccaaatttggggaccctgtactaggtacattattctccattctccaccctccactgtcctgccttttgtcttggaagccaacttctacagactatataatcagggcatgttcaccctctggctttgactgggtttggccagtgggagacaatggcaagaaggattggaggattggaggagaaaaaagtggaagtcatactctcccagtgcctccctgtgtttctggcagtggtggcatcatgtgattgcaacaccagttgggcagcccctctccctcacttcctgctgtcactggttttcatcacaaaattccctccctttctctgctctggtccaggagtgctagaaaggctttttgcttttgccagtccctaattagttccctctgccctgcacacaaccttgtgaatagttcttccagtaaaccattttcagtagacccttggaacgtgctttctctttcctttcatatctaactgatacacactcttgctatttttcttccaactttcagaattagggttctaactgtcccagctgtggaaaggttcatctggaagacctagagttttgagggacaaagcaagggtctcttttctgttgctgggcacctgcctccagttgcatacaccttctctgatccttggtgcgaatgagtaaggggaaagtcatctaatgctactgggtgacatattttaccaaacactcttctattgctcactataattatgtgaattgtgtataagctgcgttcctctcataatttatttcatttttgggtggcagacttccaaattccctctcttttattcatgcataacacatgaatgattcacaagtggtaaagtcaacagggccccttccgcttcagtccccatctgtaaaaatggtttatcaacctcatgttgaggttcagagttggtataatatcaaccctcatattgagggttggtgtgaggactaaatgagtaccatctgtaaatccttagagcagcaggtgcaaagtgctagcccacaccatgagtatttgctcatctgattcatctcggccccctttcctacaatttatatgtaggaagggggaaaaggggacttcggtaggaatttctaagtgctccctccagcttccggggttttccgcagcaccccttcctctctcaacacccatttctgagtagatttccttttccgcaaccttttcatcccaggaagttccaggaagggcaagaagggcaattgcgattctcacgttttctgctcttaattctaaaccagtgattgtcaaatagaggcctagggagccccactgaccacagaaagtgggttttgctctaggttatatctttgttattgctcttatctgtttaagtttcaagattctgtttgaacaatggtttccaagtctttaaaaagtcgaaaatcccccttctgatgagatacagaaaccccagactttaaaactctcagtcttaaacctctttggcaccattgccaagaaacttttctctattccattcaaatagtttgtattctttgccatttctgatgctctgaaacagatattcaaacaagcaagtctttatgtatttatctggagtgtctttctcaagcactcagcatgttcagtagacatttgtctccttaatttctaggcccatgggaaagataactacaacactgtttaacaacagagacatttgaaggtacaaaactttactggaacctgatccagccgctgcagtacttccaacccatagaatccagcgttactagaggaccgtccattctggttccagaggctgctaggagcgagaaaagttggagagcagaagctgtacagggactgagtcccggggaggagtacccagcaactggaattggctgcgtcatggggaggagagttagcaaggtactaacactccaattggctaacacataatttctctatgcagcttaagacttcaggcagacagatatgaacacatgaagggagtaaaaactccaacctctggaccacttcctggagtgctcctaacccagactcccacagggcttcctcccatacttcatttaggtctttggctcaaatgttacctctttagaactgcctcaagactggggcaagaggagccccagtctagggctctgagcacctgattctcttccgtccatgttcctttccatagggcaagaaatcccacgggccaacgggatgtactcactcagagctcttgcccctctcctttttagagcatactgtgagttcctgggaccctagaaaatagtgccgcaatagcaacaggtcaccagctacaggctgcctcagccttttcccaaggtctatcctcctgaggagcaaggggtggtcaaggggaggctatttgcaggtgtggacaaaactctgatgtgcagatgtcgttgttataggtgtgggcaaaaggccatttgaagtatgggacagagctggggtgccaagagaagaaggaaggctgagggccaaggacatgttccccctccaaagcactacattcgagggcgtatctcagaagggtccaagaatcctaaacttaaatgtggccttccagattatgatgaaggtatacatgtcaagataaaaggataggaattttacatcaccgtttaatttgtagttttaaaatatgtagacatgatatgtgggcctccatttgtactactgactcagttcttgcaaatattaagggtagacctgtccctgatcttcgtgtgtaaaatagcacctcctctgccactctattcttaccccagtctacatttcttcataacatcggtcaccatctgatctacatttacttatgtatcatctctttacccccactggaatgtaagttccacgtccctagagtctatattttgtttactgccttatccttatacctaaacaagtgcctggcatgacaccactcagtaaaacttgaataaatgaataacaaatctaggctcaaagctcttacaggtgaaaggggctaacctggcagtcacaaaggaaaaatatcactgtgacaaccgtctgaggagcaccttctccccttaaaataactcactcaaaacagtggagctgcaaaggtgaccagagaaaatccattaacaccttagtgcccatgacaccaggtgagttgatcgggctacttgcgagagggacatgtgagtgagcgtggagagctctgagtaggctgaagagctggatgtgggggatctgggctgctgggaaccccgaatgttggaatcgccctgacaaccttatgagggtggtcagatatgggtcctgaggaaactgattccacgrcaactgcccgccaacccagcacaccccacagtgaagaggggcttctgatccatgagtagggcccctcaaatgatgttcccctttagatggtcatggtcatcagcaggggtgggtgcatcgatcctgtggggtcttggtggtcgcagaccaagcgtccctcttctcacatctaattcacaacgtctcatcgctccgcgggagcccaggaactgccctacaacagccgaaatccgggtcgtctattccaacggactcctcttccgttggatacgggggccgtgagaggccaaacaacctccgcgaggctacccccgcagcgaccgctcggcgggcgctccattcctttaccggactgtacacctcgcctcctggggcctgaggcgggaacccgggtcgcgctgctccgaggcctcggcggaccgcgaaaggatggctcaccacccggccagggccagcccctgcaacaagctcagccccgcccgctcccgcgcccaggagcggccggcggggcggggtggctgggccggcctcgggggcgggggctcgggggcgggggctcaggggcggggccacgtggctcctccttgcgggcggaggcaggcggtgccgcggcgccgggacccgactcatccggtgcttgcgtgtggtggtgagcgcagcgccgaggatgaggaggtgcaacagcggctccgggccgccgccgtcgctgctgctgctgctgctgtggctgctcgcggttcccggcgctaacgcggccccgcggtcggcgctctattcgccttccgacccgctgacgctgctgcaggcggacacggtgcgcggcgcggtgctgggctcccgcagcgcctgggccgtggagttcttcgcctcctggtgcggccactgcatcgccttcgccccgacgtggaaggcgctggccgaagacgtcaaaggtgagaagcgggggcggcccgctcccccgtgccccgccgcccggacccctccacctgcccggtgggcagcctcctactccgggagcgcgtccctcttccagtcacctccgcccacctcttcctctccgcgcatcccacgcccmccaccttcatgtttctcagctccatttttgcctcccgctcccttgccttttcctcttggccctcatcccgagcttctttccctctccgcggcctgggcccccagacctgccctgctcgcccggttcgtcccccgccaggttactgcctccttccctgcgagaggtctcctttgttccttcctccgcatggtccgctgacaccttaccgtttcctggkccagccttgtggcagtcctcttcctctcgtccagggacccatgtcatcttcctgccaggttccctagctgctgtgggtcagtgctggggagaaaagggaacggacatccattttgcctccctgccacctttctccactcyctcgactggttgaccaggtggtacrtagacttcctttctcatttttgtctttgatgtgggtatgyccacctggcagttttcctatctctgttccgggcctctcctgacytgccgcctccagctccttagcttctgggccacatccttctctctcttcccccgctcagacccttatattttaaayccatgcacccagaggcctttggtgcgtgtttggctcttgctccatgttcccaatccctggttggggcaccaaaactatatttcctgaattccaagacaccatcaactgtgagacacactgttcattttatgacagcccaaggggtagaaggataggaaaaaaccactacatgtataaagatttgaaggtgaactctattacagaaatgctaaaattttgaaacacttaagacttagagtcgaggaaatatggtaataatagtaattaatatttacggagcacctatcatttcaggcaccttactaagtactcggcatacattgtctcatagtttcctttccacaatttaaagattcctgtggtgtcacacatccrcctaaycyaggtagtgggtatttggcgggcaggagtggtatagtgatagtgatttgttcctgacttgctgcctctgaatggagttacttcctgactctggtgctaggtcgctagcacggcctcctaccctgaaatggtcattgaatgagaactgtgggcatctttggaaataggcctttttctagagaaaggggaactggaaccattgttccactgttggtatttcttgataaattcaactctttgtggtagaacagtgcctttgtagatgttagttttcagactcaccctcctcttttcctgagcagcttgcagattggtttctgaagaggcgagatggaaccatgtgtacatcttttagccatatggtcctggaaaattatttttaaatgaaacttataagctgttttgacctccagtttacacttgcctacatgcctcactggtcccattagctgaacgtgcctttctgagcagtgcttcacaccatttcaacacatttggtcaggggaggagtgatgtcaacacatctggtcaggggaggagggaggaagaacatggatcatggaactggaacacctaagataaggtaatctcaggggacattgtgggcatgaacatcataaaaattcccagatcgctttccactttgaggttataagaggtgttcagtggctgcagatggacttattctagaatttcttccttcttgagagtgctggggggaaagattagcttccagctgactcacatgtttggcctcttgcaatgcagrgtttttagttttcctatgagttgcatgtctagatactgacccattctgctcctggatgagggttaccacttccaaacaggattccccagtgcatggagcctttctctaaaataagaaagcgaaatcagaatttaacctctgaaaaggaaatggaaggatcaaagtctgtgggggtgagccagggtaaatgggaggtgggagatttcagtggaaactggaggtctcctgtgagccattggtgtgagtcagtccttgagccagatcgtgttgggagggcactggcagaatctgctgtcagcctgcaatgaagaatgtcctccactctaacccaaaggggtgttccctggtgaggccctgctgagaagctagggttggtctcgcttcatctctgtgtcctgaggtttcttgagaaaggttggttgtgggcccgcagagggctgtgctcatcccaccctgggctgtgtgagtactgcccatgctctctgctgaggacacctgtatcttgaggcaggaacagagacagagtgaaggtcacagggagagagaagaattttgcagccatatttggctggcttcaggcatttaatctgactgaatagggttcatttcttcagtgactagggcagtagattctctaggcacctgctgccccggggcagagcatgtgtttctgagaacctggtttatcccctttctattccagagcagctccggttgtctcactgtatgttttggaaactggttgtatccaatttagaccttcattgctattcactggctaatcaatcagcaaatatttgttgagtgataagcattgtttgcattgcagttggggaaatgagctactcatagaaggaaaattggcaactgttacaaagctgtgtttgaaaaaggccaaaggagtggttcagccatttcttatgggaacccaggggaggggaaagtcacagagggctaatctgatcmccagaggccttcatgccagtagttatttattacacgcttgccttatgccagcactttgctaagggccttcacaggccattattatgacaatccttacccgggaaaatatctgtactatggatattgtcttcctctttttttaaaacaggtaagtaactttccaggtttacacagatgctggagaaggtcattgactccagctctttttggctttctggagcctgggcaggtagagaggtgggtggaggaggaaggatactccaggtggaaaamcagcatgtgccgagctatggaggtgaggttcgtaaggcgtgtgtttgagtgacagtgagcagtgttggttttgccccccttctcttccacggcacaggccacatctgctatgtgtacctgtgattcccagcacagagcctggtgcagagtaggagcccactgcacgttcatggtggccagtggcctgagcctcacaggattccaaatgacagcrtgagtgtagaaccttctgctggtgccgtggatcctcttgactcagaccgggggtgtcagccaggtgtgaggggtagagaaggcattttgtccatccagtgacrtcactgcccagaaactgtcagcaaggaggaaggaaggcatgagttggtgaycgcatagtgctgactagctggacagggcataaactaactctctgtgtcaggagagctcctgaattcttcggtgtagagtccagagctgagggtcagtagattctagtcactagaccaccaggtctgactggctcttggtggtttgggtaaatctgtgcctctgtcttcatggaagtccagacccacttaacactcggaggctgcatgtttcttgttaagagttgtttgccatccagcacctsaacggttgtcagagctagaaggggcattagagatcattcatcctggccctcgctgatccaggaggaagcagaggtccagagagacatgtggagctcacggtgctgcagccagttaaactccaagcaaggcttcctgctccacccagtgccctccctgcacttgtgagtggggcaggggacgctgcccttgactccagaccaagcccccagtgggggctcagcagaatccccacaacaccccctaccagagggcatcccctcacccatcaatccaagatttacagctgtccaacttctcttgcctcgccacccttcccctctccattagtccatttattctgtggttggtagaaaaattacgctgttcagagcaataattgcaccaggaaagggttttctccccagtagtagagctagactgatactactgatcattttggtgttaggcatttaagacacctgacacttcaaaaagcctctgtcacccagctctgcattgcgttgacagtaaagcttaaatgcagctttgctttaacaatggagcactcacataaggaccttctctattccatctcctgttacttgtcaaaagacaaaattacaccacattcaaaaatcttaactggcttctatttgtgattctggaatcggacaacaccacattctgtcttacagaatgagtattctgatgagctgagcagaggagtttggctttatagacagaaaaaggctgaagaaagtagaaacagatcaaaaatctgattggttatttcggtcccttttaaaggttaaagcagaggagacttctgtatgttggctgaaactggcttgtttgaagatttgactgttaactcactctctcctgatcttggaaggtcagatcgacagcttagttttggcttggtggcgtggaacttcagcttgagggactccatcttggtttggtctcttgggccttgtgcaggagctcartcccaaccaatggcctcctagaaatattatttaacagttctccccttttggtcaggttctcacctaggtgagagttactaaaacagggcatcagcactactctcagtaatcatcgttttgggttttcggtcttaacacatcatttataggttaaggtgtcctcattatcatgcgtttcttggagttttatcattccagctggagagagaccatttagcattcagcagagggctgcatatagayatttaagactctttgagaggatacagtgtaacagggaaactactgtaatgactctccccaggataatactaagagtttacaatatgacgcttagccagggacccatgaaccaaaccaactaaaattgaagagatcaaagaatgagccagatgaggaatttaccctttttaagcaagtactatttgttcatttttttgcaactgagtctcaatacactatgtgtctatccatgtgcaacagaaagtgtcagcaattgcacagattccctgttcgctagtaggtagcagttctattatctagtatcccatgactgggttaaattaaagcaggaagtgagaacacatgggtctaaaagtctgactctataaaagggaccactagtacagtttgaacaacagttgtgttagggatgttgctgaagttacccactgggcagactaaaggatccctttggtcatgtaaagatctgggtttagcgtgacaaatccaacagtttgtgaagttacccacagaagccactgattgtgaaattctaactacagcattatcctgccagacaaaaaaaggtagatgtaatcaaggataaagtggaagtcttattccaatgaaactcttgttcagaagttttgggaaagcatgaagttgtcaacttcttgtcctggtttgcagtttgattgtctctggttatggcattgggcattttggtgaactctttgtgtagcgtacacgtcaggcatgagacttgtcccttgaaatgtatatcaagttgttcagcttctgtttatagggctttaggcacagaacagttcctgttcttagttggagaattgtagctagttattggaagaaactggaaraattcagaattcaatccatcttataggtagatgataaaaacttgaaaatgatcaacaaggctacaatctaataacagatgtactatagtttttctttaggaacatattttttctctctatagtcacccccatttctaccaaagataatcagggtaagtgggaggcagaggtcacagtgagccgagattgcaccactgcactccagcctggatgacagagcaagactccatctaaaataaaataaaataaaataaataaaataaaattcagactaatttgcttgcagaaaatatttagtcacatcagacttggcctaattatttacataagtgtggcaagaatagtgattgaccacgtaggctcttcttaagtttgctttgctagaacttatcgataaggaatctcagattggacttttaacaacttctcaaggctaggaagtcaacccaagcccaacttcagatttcacctgcagtacctatagattcatcataggtatattctcaagtatggcatcacactcaaaaccttggtaatatgaccagtgtttcctattgtatcctgttgtaaagagagcagatacttattgaacttatgcaaataacagtattgccataaaaataggaatattcacaaatagtttctgaattccagagaggtcttgtagggagaaaatgtttccatttttgttcacaagagtatacttaccaaattgctgtaaactatagatagcttaaaagaaaataagttttcttaaatctggacaacaaaacattaaaaagaaccagcaacgtttcaaatttaaaaaccagaaaaacccataattcttcattagttcatttagtctcatgtaattaattcttgttgtgcttgatcttggttatcagttttgcagacccatcagtttttttcattagagttctggaaattctttcccagtccaatcgtattatctcgaagttatcagaaatggtacttatcagagacgtttccgtggatctccttgaagatgaagcacttcaggattatagttgcttagaaaaaagcttttagaaaaacatcagaataaagcaattaactgtagacaataagacttaaaatggttgtggttaaagatctgatgagagttcatagtaataatgacacaattgacaaggaaatctggttattgctgtgcatacaacattttaacctaataaccaaaattaaggctgataatgtatcatatttctaggaatatcatataattttggggatacaccttaatagcaagtataaacatacatcaataaatataactcaaagaagattaaacatcatttcttgtttgacaatgcttcccatataattaatacatcaaatgagcctaactagtttagtatctcccctttgcagaatctttgagatgttccagggccccctgaaatgttccaaagttacttcaagttcagaaagccttaatttagaatttgattttgggaagtttgtacaaaatgtcaaaggtttaaaattaaaacacttaatcagcctgggcatggtggctcatgacggtaatcccaacactttgggaggccgagkcaggaggataccttgagcctaggggttcgagaccagtctgggcaacataggaagacccyatttctatattaaaattttaaaaaattagccaggtgtggtggtgtgcacctgtggtaccagctacttaagcagctgaggtgggagaattacttgagcccaggagattgaggacaggtgagccacgatcgcaccactgcactccagcctggatgacatagtgagaccttatctcaaaacaaaaacaaaaaagcaaaacaaaaaaaatcacttgatcaaaataggatcacaggtcactgtgaagtcacagtcattcatctaaccagaatgataattaaaagacttcaaaatgaaaatatagaatgttacattgttgcagaaaaaacagctcttttatagagaggactccattttcttaagtaatcaaggacctagtaaagacaacatgaagcacagggaatcatcttgatgaaacaaaggatctttctttaggagaattacctaaaaggtacagaaaaacctttcactgtttccttttaagaacagatcaatacttcaagaaaaccttgttttaacagagaggaccaaattctgatttttcatcagtgtacttttgatattaaggctcatcaaaaaaaaaaaaacacaaaaactataagttagcccattcgaccacacttgaagttcttttctcttcacaacttccttgtatccattggtttgtcctgtactgttcctctttctcattgtgaaataaccagtcactctactttagaacaaaatgactctctttttcccttaattaaaatacatccttacattttatgacttcctttataaaccgtgccatacttcccttgcatacagaattatgtcccttattatttttagttttagttgcttatattaattagtttttactccttagtaatcttaatttctagtgaaaactagcaagcattgtgaactgtcttctattaacattcaccatttcataatttctagaaacatgtttcctcagcttttcatgcttattacagacccaattatattctctatgccatacaaaaacaagatgccaaagcatatatactttagacttatgttcagcaattaatgtttcagtattttaatttacttagaaatgatattttatgaatatctatgacttaatttaacgtaaaataaccgtaagaggaggctggatatgtggacaggggccaaatgaagaactgccttctggttgtagattttcttctaaagtcagttagagcccccagagaatgttgaatagagattgacataatcagatccacagaaagaaaagatcatttggtggctagagaggscagtgaggggtggagcacattagaacctcaccaggagagaaataatatgttgatgtttctctggaagccctgccatgagaacctgtactagctcatgggacacggagggtaggttggaggtgaggtcagtaaaaaaccagatcacgggttcatgccaacctaggacaggcatgaagagatggaggtttgggtgagggaagagacttcagaggagagtggacaggatgtggaggcaggtggggatcagcaatcccctggtaggggcagagggattgcatcctgggcctggcatgcaacaggccctgaccatacctgcctttgtgcaggctgccttgcaggtgaggtttaaagccaaaggatgcaccccagcttgcagatacttggataggctcaagttgctatccttgtgtgctaagggagtcaagaaggctccccaaaaagtgtgtggtgggrgggtgttgaggaggttggggaaatggcatcataggatgtagctcacctcactctgctaaatacttttgacgtctgactctggtaaatacctccatctacttcctcttcccaaccccccacccacctccctccttcgaggagtccagaagctacaatgccaaaagcagactaccagcaagaaaggtgggggaaagaagggggtggtgtggccacaggccttcctcccagctcgcagagccccctcccttgtatcagccccaagaagggccagcttagttgccttctttccagggatgcgtcagggtgtgccaggctcttcctgcatctgtctcgtggaggtgaggstaacactccttccccaggcgtaacgtgttcttaggagctctgataccttctgaaattgtgttcttctgagacgtcgtaaggagtaagttctagggtggagtattagggtgtttttgcattgataaaagtaagtacctgaggctaggtaatttataaagaaaagaggtttaattggctcagggttctggaggctgtacacagcatctgcttagcttctggggaggcctcagggagcttttactcatgacagaaggcaaagcaggagaggaagcaggagggggttgggaagtgccaccctattttaagcaatcagatcttatgagaactcagagtgagaactcactcgttatcaagggggcagtgccgagctgttcatgagggatctgcccccaagatctaatacctttcactacctaatctaatacctttcacctcgtctaacattggagatcacatttcaacatgagatttggaggggacaagatccagaccatatcaggtggggtcagaggtcctgctaaaactgtgactatcagggatgttattcagatattagtgttctgtacttaatgggtgctgggtgggctgcctgtgtaaattccactccctgcccctggggcatgagcttcaaatgggaattgtgcctgccaccaggcaggcctcctcctcctctcatctgcttcagagacgcatgtgggtccagctgccatggacgtcatcctgagctgtccaggcagacactcccagtctggtctcttcttgctcccttctattctggctcccatgcctcccaaaaaccctcctctccaggcagcctggtttctgccagtcctctcctcctccaccttgctcaggcagttccctgcccactggaccgacggtctaggttcaactctgtttccayctttcctgctgagcccatgccttggtctgcagggccgacctctccaaacttgagagttctgtgccacatgatttggcccctgccactgccctctcacggcttgtgtgtcttcctctgtgcgcaccttggcttccagctggagcagcctccatgtgggtggaactttggtggatgctcacggggcacctgacctggaacctgagctcaggagagctgcctggtatatgagcttgtttcttctcagttcctgggctgtggcccagaatggtgccattattctctctgccaatgtttcagcggccagcagccttgtggcccggggcctgatgcaggggccagactctggcctcaaggcttctttccccgcagttcctggattccagatgctcctgtttctgtctggggacccagttcctgataccctttaccccagtcactcaagctctgcccactaccagtatctctggccccaggaaacttccctaagggtcccctggggaattccagatcccctaaggcatgttctccaccctctggaactgatcccatttagagccccagggacaaaggcaataccagggcttttcctggggggtgrggggctggggggatggcgaggagcagggcaaactccttcaacatctctcagcccccatccctggccccgattagtaatggagaaacagataccattatgaggcagtatgacttatgctaatcatccaaaacacaggttcccttttgtgagacgctagaaatgcagaccaactggaatatctcagaggtccttttccaaggaaggtgtgacctttgtcataagagctttgggatcaggtgctttgaggttggcaggggtgaggcattgcattaggggagatgggcgggcagagggggtaccagcccctcttatttacccctgggttttttgtcctttcagcctggaggccggccctgtatctcgccgccctggactgtgctgaggagaccaacagtgcagtctgcagagacttcarcatccctggcttcccgactgtgagggtgtgtgactgacaggaggggaaggcaggctgggcctgctttgtttccctttataagggaaagggaccatgtgggatgtgtcgggatgggcagatttcagctgctctgatttgagctgggaggtgatcatcacttgggctggtgagagctcccacctcccaaggtcctcttcaattgctctccctcttgacctccaagccttaagaggtctgatctaactctataaaaccaggattcaggctctgacccacctgtgggcagggtcagactctagaagcctagtggtcccccacaaagggaccccagacactctggcaagcctcagcctcctcaggcaaaaatgccttgaaccacaggtagctaagaagggacctgtcagggtagcctcaccccactgtcagaatgtcagtgcctcaggcagcagggatccccggcacgggagttatcacacccaaggcatgagggctttgtcacccccgctctggtggaaagtggcacgagatctctgatgatgccttacctgccagcctgcccagtgcagggcatcaacagcttaattaacgtctgaacagcttccaaggctctcaaataggaggccctggatagcccagggcagcaaggctgctgcagttatggtgagggccctcccctgggctcaggcctggctccaatccaattagttttcttccagattagagaagccaaattcaaatctctgtctctgtagcaccagctataaataatatgtaccctcccaccagaatggcatctagaaaascagtttcttctgtagccattaaggattattaggaaatgcctttgaaagctgaaatgccaagcattgtccctggaacaagatacctctgagctgggggtaggggcagccaagtttcaagcagaactgtgagccagaactcagcttaattaccccagcagcatccatccgggaagtaaggccgtggctccaccaggaacatccmgctcyaactccatgtgacctttctgttcctcgagcccagtgcaacccccactggattcagggtttccacacctaatagaagtcccttcctaaactgttaccacatagggtcagggccccccaggccccaggtttagctgagaccaggttggtctcctgatagcgaaccaacagctactgccgtgtcattgaaaagtggcagcagagagtctgcatgtcaatcatccctttgaaatgaaaggccttcctggcagggacatggtgctatctttggccctaagrtgtgtaattgagaatattcaaacagggcactctgttcctttggctgaaccaggktgagtggccctgagtgggaagctgtgggcaagttagtgtggcacaaggaaccatcattcacaggctgatatttttctcccagtgagcatgagccrcaggggtgcagccactgcccagcccccaggggaggggttgacactggtacagcagccagggcaagacaaccgattggagttctgtagggcctgacacctgagctttctgactctgcctgggagaggctgggcacagcagggatgaaggagkcggcctaggccyaggaggtcagaggctcctcagcgccaccccatgtcacgcagcgcacgcagcctggatgcctcaggtgagtcaccatctcctgaactgcctggctggctgtgggaggggcactgggagggccctcgctgggctcctcagccctcccctgcctccagacgggcagcacctggcagggccagtctggtagtcatctgtccacagaccaacacggtggcctcccccggcaaagcctttcctgcctctcctgaggaacctgtggctcagttttggccagggggaggcacccagtgcccagtccataggccaagtggcttgagctggcaggtctctgctctgaggtcctatgcagcggctctcaaatagtttcttactgtgaccaactgtaagcaatacacatttttacattgtgatcccaaagttggtatgtatctattatcattaaaccagaagtttcataaaacaagattcttactaagtgcagttaaactgtgatattttctgttctatttttttttttaaatccggctgtgattaaatacattgatttgacagctcattacaaggttgtttctagtgtttggaaaacactactcaaacagattccaatatccagagattcggggccatgaagaacctgtgtgcccttggcagaggctgacctggagactgctggtgggccagagacatagccctgttgccctgcctgctgccctctgggggctggagcctgtccttgcactctgtccatgaagagctgaaaagcgagggcccatgcgaagcagggggaggagagagtgcttttggtatgatggggacaggcccacacacaagtctggcctccctgagtggcatgtgtgactgtccttttcttctgyctccagccccttgtcactatgagcaaacagtgagcttctaccagcccagcctgtttagcaaacacctgggccctgaagggcgggccagctgtgtcaggtccccatcaggttggagccagagcccagctggaaggaaacaaaggygtgggagagggaggggctggttggctgcaggttctggctggagcttggcaacctagaggctggaacttccrggtcaaggggcttctccgtgggcctcaggagtgcccttcagtgggaatagaatgggactttttatggccgaaggcctggccggagcaaggggtacacagcacagcagcataggggtggggaagggcaggtcttctctcttcgaggctctgaggagatcagtgatgtggtttcaaatccaggcctctctgcttactgtgtgtggcttggaaagtcacttatcagtgccccagccgtgggccccagtttccttgtctgtaaacatgggatgataacatccacctaagaggaccgttgccaagtgtgaagtgaggtctcccatatgcaagtgccaccatgctagtgtgatttggacttcagtaaaagttagtttgcttccttcccgttgtcccatctcactcctgggccacccrtggggctgctggtagctggtgtgtggctgctgctggactgtgtggcagtccatccatctgtcagcagccactgcgggcctacttgctggrtgcccagcaccgcactcaccactgcaggcgtggccaggagcgtgagatccccagagcccatggccagtgagaggcggccagggataggtacccagggwatgccacaggagtttgctgggctcacggagctctttcactggtcagagaggagtgtgtgtaggagrggacttctacttggtgttgaaggacagatggggtttggctgggagagaggaggaatgtgggcgggccttataggcaggcgagaaggtgagagccaaggccctctgtgggcagggcgaggtggcgtgttgaggagactcgtccagctgggcagaggctcatgttgagggatgaggcagagctgggggaggagggagcccagaaatggcaggtccttgaatgcaggtttggaagcagggacgccctgtgagggtacagagtctgggctgttaccttctgtggcttttgctagaaggtgagatgtcagggaggaagacaggactccaggatgtctcctgtctctctctggaaaaaggaggtgggcccctttctcagcagtcagctgctgtttttgaggtcttctccatggataatccacggtgttggaagtggttaaggtaatggatcctcatgggcttaccataaaaatatctggaggctggaccattttccttaaaaygttataaaagctggaattgaatgccatcggtgtcacccctgggaagtgtgctttctcttgagctcttttggccccragatagcagtcactccatagtttcgtgaagaccagcctggtgttgcctggttttctgccattagggagcagctagaggtcttccagtagctcctgtgtaaagtgatgaaagaaaagggctgggtgctgactgctcctggagaaaagcaacacactcccaragtcttaattgcctgcttccagggagctgtggtggtttcccttgggcagggcacacgccccagtggttgacttaataaggatacattttaatcagaggacaaaaatgtgccctgacttgatttccgcatgggcttccagcatggtcaaagggcagagattctctgttcagctgaacagatgtctattgagagatgccagacactgtggagcttgcagagataaataaaatgtcgtcctgcttcctggtcagaggtgggtgcatgggtgagtggtggattcaggttgaagttcattgcagctggagtggygggartggagggcaatgtgaggtgagtttgggtttggagcctggaaggccttgaatgcagtgagtttggacattattcattgacagtggggagtcatggaagagatttgaggaggagcaaaatgttcagaccagaactgtgccttagaaaactaaccttagtagcagtgaggaagatagctggagtatgaaaagattgagcatactaaaacttctgagagcatgaaaggtggggactgatgcagtgacccaaaaatacgtcatcatctgtcgggcctggtctagacaaggcaggtggagaaggagaggacttttgaagaggtaacacggaggtcaaattcataggacttgtcagctaactggatgacgggtttttgaagagggggatggtgtgggtggcagggagggggacyggttgctgggtgaggtaaacacargtggcaaagcaggttgagagaggggtgattcagtcttggggatggtgggggaggggctgtrtccagacacctgagtggaggccaccaggaagaaccaggagtctaggacaggtgaggtctgagatgcagagggttcagatggcaaatcatttggacaaagtcattggctttggcaagggagaaatgataggtttgttcattgatccctttatccactcatcatttagaagcaagattgagcaacttctttgtgacagtgccttcaacagctttttaaacagamgagtgtcaggacctgacatgtgtctgtaggagagaccggggtaggagatgggggtggacagtgggcacaggagagcagtcgaaagtgaagctaggaccagggcaagggggccaagtaaggctggtcagtgtcaagccaaccaggggagggtggcaacgtgaaagcaacaaaggagagcaaccacaaaatgtggcacgaaagttgacaaatgctcrccatgggaagacaaagcaggcagtaataacatctgtaccagagagaggccaggagggcggggagagatcactggagtggctgaagagaaggtcaccaaggagcttccctagaacggcttcaactgagggttgtggggatggccagagagcagtctgaggagcaagggcagacgctgttccaggaacrttggcagcatggggacacgggaaggaaatgcggttactcgagaaggaaggagggcctctcttcatccccatcctccttcccttcccatcctttccttttttaagggttagactagaaggattcgaatctatctgtaggcctagttgggcrgctgtagtagaaaagagkaatgatgagagatggctaggaagaagttcctgaagagcgtgaggcgtgggagccagaactcggaggagacattggcctgggaggtgggtgcgaagcttctgaggacagaagggaacagctgaggtgcagcagggccttcccttcagcctgcatcctggggagaggctcttggggtccctgcatccccctgggccactctggctgaccgaggttcctggtcagactccaagctgcttgtggctgctgggatcttgaggggttgcctttttaaaatttttttattttttgagacagagtctctctctgtcgcccaggctggagtgcagtggcatgatctcggctcactgtaacctccacctcccaggttcaagcaattctcctgcctcagtctcctgagtagttgggatacaggtgcatgtcaccaaatttggctaatttttatatttttagtagagaaggggttttaccctgttggccaggctggtctcaaactcctgacctcaagtgatccgcccacctcggcctcccaaagtgctgggattaccggcatgagccactgcacccgtcctggagaggctgccttttggtagaagtaatgcaagcctcttttaatatgggcacctgctcagatgtgggtgacctgatggttgatgacaaaaaaatgaccatattacttttcagaggtgaaaataacagctgtagctgtgggaaagccacccatctcaaggcttcatgatgtcagtgttgttctcatatatgtagaaaccagtcaaagtgtaacctgtctgtaaataaacaagagcaccatcaccatgaataactgcagcgcaacatcaccctcgggtttcttttttgtttttaaattttatttatttttmatttttaactttttgtagagatggggcctcactgtgttgcctagggtggtcttgaactccagggttcaagtgatcctccctcctaggtctcccaaagtgctgggattacaggtgcgagccactgcacctgacytggtttattatttgtcggcaaaccaaaccccaaatagatgtatcttcaattttgttcatgaaaaagtgtcagtccataaatgccgtaacttacattatcaatacgatctcctaatcaaggaaatttatgatcattttcttaagtattaggataacataattttaataggccaataaaattaaataactgtaaagaacgctatttaaatatgtgtggtatgtataagtggatggttttcatccacaataaaagtttatattaatgttttgaaaagagagagtaaagcagtgagcaggagtaagggcccgggggaggtcacagggagcagaaggttgcagatggggagagacaggtggcttctctgcagcctttgttcctcatgtgggagagggtagcaggtggcttccagattttctgcctacaaatgtctgtaacaaacaagtcctagctgatcatggttcctagtgtttaaaaggtatgaaggagggaaggggatgctggtggtgggtgatgatggtacagttaacatgtaccagttccttgatgtatgcactaggtaccatgctaagcactttagatgtatggtcatggaatcctcacaagtcttcaaggtagatggtgtcatcctcatttcaaagatgagaacacaaaggttcggagcagttgaygcgttgcccaaggtcacacagcaagagcaaagcagaaccagtccttgaacgaggtctgccagagcccggggcctgttctcagctgccagcttgggataaggccaaacagctctatcccaaggagggagaaggaaaccagtgtttggctgttggaggcagaagtccaaggtagtgaaaagtggccccgaggctagagtcccacaggaagaagcctcttcccagcctgcaggctctcccctaggcagttcagtggccggcttccaggacaactcaactgtgttccctcctgaatcggaagagcgcaggcaaaagccttggcagctgtcttgccgcctgggcagaagcccagattgccaggagtcaggctctgttcggtctgtcctcttgccccaaggaggtgacagactaggcttggggtgtcatgtacatgggaaaagaggacaaagtggtgagttaaatcagctagtctgtagcaaggcatgtttccccagggactcaggtccccgcttcaagagaacctgttctggagaccccttccttgactgtgtctgctgtgctgggctgggacttagtggacagagacagcagcctgtaagccccttttcccaagtaaggagcaagggcacattgacatagaagcaagctgacatttcccaagggacgtaggaagtgcctgcacttcatgttttcagatgagtctgcaaaggaaaacagcagtggtacttcatcactcatccattcgataaatattggttagtaattacatgctaggtactgtgctgcatagaaatggccctcgaggaggaaagtgtatgaactgctgcccacaggatccatggatgcttctgaggggtgtgggagggtaacaggggagggagccagtgtccagctcctagagcaacctccccccaactccccccaattcaccattttacagatgaagaaacaggctcggccaggcgcctataatcctgacactttgggaggctgaggcgggcagatcacaggtcaggagttcgagatcagccttgccaacacagtgaaaccccatctctactaaaaatacacacaaaaaaaattagtcgagtgtggtggtgggcgcctgtagtcccagctacctgggaagctgaggcaggagagtcccttgaacctgggaggcagagcttgcagtgagccgagatcgcgccactgcactccagcctgagcgacagagcgagactctgtctcaaaaaaaaaaaaagaaagaaagaaaaaagaaacaggctcaacaacattaagtgatttgcccagccaccgcattgaataagtaggcagattttcagagcaggcctgcgtggctgcactcttggccactatctattactgatgcccacctgtgtgtttgcttccagttcttcaaggcctttaccaagaacggctcgggagcagtatttccaggtgggtgcccagctctggttgtcctgttagcatcttcctcccccaacctccctcttcacctgggtttctattggggtggagaaagccctggcagtcggcagggtcgagggtgaggcggtccccacgggaagcctaacttgtgtcttcccaaaactatcctcccagtcagctttagggaaaggcaggatgaagaagcccttcaggttggacatatccagggccctagggtcggggcaggggcaccatgttcccagaagagctcttctgtcacaatggggttggcgcccagagagcagaccagagcccttggggaaagtcctgacgactcccagttctgagggattctttcctgtctgagggatgggtgtccttgcactacttggggccacaggaggactactcaagccccattcttctagcacagggaaggactgacgcctcgtctgtctctgtcagagctggctgtgccctcggccctttgtttctgggagtgaaggtggccagtgtgcygtggaagcagctctgctctcctgacactccgctcacgcctgttttcatttacagtggctggtgctgacgtgcagacrctgcgggagaggctcattgacgccctggagtcccatcatgacacgtggcccccagcctgtcccccactggagcctgccaagtactttgggctggggcaggcttagtgcattgtgggccaggatcccaggcctgggagtgagagggtggtgggaacagcagggcggggaccccagtttattttccttgctgcctttgcctgtggggctcacacaccagtctgctggagctactccagaaccaagtggcagctgatggctggtggtgggcttcctatcgcacaggtcctgctgaagagccctgtttttctggggctgactgatggtgcaagggtccatcccaccaggtgggaaggaaaagatggatggggcttctccaggttgtacctgctgctgtttcttgctaccttccctcaaaatgtttgcgggacgcagcaggatttcacatgctctatccccgggaaggccactgagagtcagaatggcatgaggaggaaaaaggagatcaaatattttgagggaamttggggggaggtggagagaaggtggtcatgcctggggcatgggggtggcccctggctctctgtatggcagagcatcaggtgcagtggccggtgctctgtatctgtcagccaggcaagcttcccagcttgcctcttttccaggaaaatgaagacagtaaggtgcatggtcttgcccatactttcccaaagaagagacagctagattaaaaacactaggccccccacttctggatcagaactcaagataggataatgcccacctcggaggactcttgccaagaaggaacaaatccatgtaccagcaggagctgctagagggagcccagccttgtacacagtggaggccccaggtgctaagraggcctcacraggccgctgttggtgcgcagaggctctcttaaaagtttgtgtgcaggtgctctcagagacatggccctgctgagagattgtgtttccaagtgtcagttggggttgaatccaactcacaatgactcctttgtcatctttcccaattttccatcctccagagggcctccaggggaccctggatacagcatagtctttatgtggtttggggttccacagccagaccctgtctctccagaaaacacccatgtcagcctgtgccctggtccttgctgcttctatttctcaatgactgtgtttccatctccctccttacacacacacgtacatcctcatggcacattttcagccctggggtatctcaaaagcaacagctcaagcaatcctgccaaggtctctcaaagtgatcyttttttttttttttttttggaagacagaatctcgctctgttgcccaggctgggagtgcagcggcacgatcttggctcactgcaacctccacctcctgggttcaagcaattctgccgcctcagcctcccgagtagctgggactacaggcgcctgccaccaagcctggctaattttttgtatttttagtagagatggggtttcaccatgttgcccagggtggtctcaaacwcctcagctcargcaatcggcctgccttggcctcccaaagtactgggattacaggcataagccactgcacccagcccaaagcaatccttttaaagaactttargaaggaggtagagatgtgtgatgaaaggtgagctgcctcttctgaagtctgarggtgggagtggggaaaggggtactggcccccatgtaggttgtgctcttctgccagcctagggaagacccagggaagaggtctgagaggctggccacctgatgccaccctaaaggctcaacacctcttttcctccaccccagcggggtgcactctggccctcacctgtctagcatatccatttggactgtcactggctgggctccagcatcaataccatgtttttgtttgttttgttttgttttggatatgttttgttttgttttggaaactgggcctcagtttcctcatcttaaaataaggagattgggttagagatatagatggcttctaaggtctcctgaacccaaggctttctgattctttcattgctttttaatgcctgctctagggaggaaggagcacatctcccccttggtcgtgacttgtcacagttccagacttatagctgttgggttctaataccccccagctctcaggggaccaataaaaaccacatccagtcagcctgggcctgccccagcacatggagacaactggtctcaaagcagcccttcccagtccccctccccacacggcctcctacccacttccgactctttttgtttgtttgtttgttttttggagacggagttttgctcttgtagcccaggctggagtgcaatggtgcaatcccagctcactgcaacctccactccccgggttcaagtgattctcctgcctcagctgggattacaggttcccgccaccacacccagctaaattttgtatttttagtagagacgggctttcaccatgttggccaggctggtctcgaactccagacctcaggtgatccacccgcctcagcctcccaaagtgttgggattacaggcgtgagccaccgcacccggcccactcctgacttttaaaaagagacaggaagcaaaaacaaaaccaagcacccaaggtaggtcagatgaagagccagggttagataacaagagcaacatcctttgagactaaaggtttggttgactcccttggagggccctgtgtggaagcggaggagggcgggatggccatacctgcagcactgcatcaccagcgtctggcgttgccagmggttttgtcttatttctgctggctgtgcagagtgactgccagaattgtctcttgcaggctggaggagattgatggattctttgcgagaaataacgaagagtacctggctctgatctttgaaaagggaggctcctacctggstagagaggtgagctgccctgaagttccctgcaattcttggatagccatggagagagagccccagtttgggagcagggcttttcctgccaattctagggtcttggctgcctgggtcttttagcctggcattggcctgacccctgctgggagccatgggaagtgcaggagctggacctttgcgtttcaaaaccttgctgtttattcttatctccttcacggaaatcaaatataacacctgctgttattgagcattggaccagattgctgacacacgtagctgctaatccccaaaattaatgaaggtgatcaaatagcatgcccaagatcacacagctagtaagttggtagaagrgggctttgaaccaggtccgtctggctccaaagccaatgttgtttccacagtgtcccactccatgggactggagtgaaatatttgggagggagggaacattagcgacgccctagccccaccggaggaaatggggtcctttacccagatgccggtctgtctcatgtggggcatccgtgagccagctccccagcgcttccagctgcagtgccctgtctagaaagcagggatgattacgtttctccgtagtattgttgggaaggtcaaatgcagcagtttatgtaaagggcctggattgcagctgacacatagtaggtgctttataaggatccattcccctcgcctaatgcagagagctcaccattctgccattggttcatggacttctccatagaccagttgtgagcttttcccagctgcaaaggtgggacgtgccagtgcacgggagatactccaagtcagtgcagggagacaggcatgagagtaggcatgaaattaaactgcactgtcagcctgagtgattttcctgctgaaactcaacaagcacagctgagagtctgagctgaagccagatgctgtctccaggcctctcagccctgagagaggaggcacaggggttggggaggggaaagacagcttggcttaaggagtgcctgaccctctggggtcccagttcatgcctggggtcatgcctgttatgtagaggtgataaatggtgattggaatcaggtcttttccctcccctcccaccacagtccttgagtaccaaggggctggggtcccagtggttggagccaagtgccccatgcccatgcagtggtgcttagcgtgggaccagtggctaagggcccaggttctggagccacactaagctgggatttgtagcacagttcaggcatatgcaagctgtgtgatctggaggcatgatttcacttctaagcctcagtttctccagctacaagataggagctttatatttatttatttattttgatttttgtgagacggagtttcactcttgttgcccaggctggagtgcaatggcactgtcttggctcgctgcaacctccacctcccaggttcaagcatttctccttcctcagcctcccaattagctgggattacaggcatgcaccaccatgcctggctaattttgtattttcagtagagacgtggtttcaccattttggtcaggctggtctcaaactcctgacctcaggagatcygcccacctcagcctcccataatgctgggattacagacgtgagccactgcgcccaaccaggaactttatttttattattttgagatggagtctcgctctgtcgcccaggcgggagtgcagtggcacaatcttggctcactgcaagctccacctgtcaggttcatgccattctcctgcctcagcctcctgagtagctgggactacaggcgcccgccaccacaccaggctaatttttttatatttttagkagagacggggtttcaccatgttggkaaggatggtcttgatctcctgaccttgtgatctgaccaccttggcctcccaaaatgctggaattacaggtgtgagccaccacgcccggcctgggagctttatttttaagtaaacacttaygtacctactatgtgctagtcactgttatggcattttaataacattaaccccttcagttctcagaacagcccccctgaagttggtggtattattattattgttgttattattattttgcaagtaaggaaatttggtcagggaaaggtttggtgcagtggggccaggattccaatgcaggcaactgtagtgtacggtgccgcatctcttagtctcctgagaatagctgctatttcagtgtttctctgaagataaatgaggcaatctgtgtggacactacataatacctatgcaatacaggttagctagtgctttctctttatttctttctaaaaaaaataatgatgactgatgtatatttttctgattcggagtctagataggaagctttataaatataagaaaaaaggctagggggcgccacctgctccatggtgaagagtgagacgtcagtaacagaagtccgtgcctgccatttgcagatggcctgtccgattatgctcagaacttctcttcccatttctaatgtggggacattgtcatctcaacaaggcctcttgttgccttcagagagccccacgttaagaaacgttttcagatcttcttataactatacacattgaccaaagggcccctctgactactgcacatactgggctcagagttagcctgctgtttagaagtttacccaattccaaaggtttattttgtttgtatcctacccatgaaatttgttaccatatgtatttgaacgcaataaaatcacagttctttaaacatctgtgactcaagcttccataaggaagactgctcttgcccccaacaattgatatttcaaacaaacaataattagtaatttctaaagggatcttttccctttagaaaaatgttatgagaaggccctggggaatcctggacatcagagrgcagtcttggggtgtgaaggtcttaaagacaagaacgtgctggctcagtgcaaaaaacaaacgagaattaaaatgaaaccacattttattgtgctctttacaaattgctttcattagaaagaaaatgctacccagttgggactgtcgtaagaaattaaagcgtgtgtggcatgcacagctccaaggcctctcctcctgggcagtgattggcacttgctacctactggttagctgctgttgatggcgagtatctcttgcgcatcagtgtggtccactctttgtgggtttagagtctggaaggagcacagctgccatctgggtgccttcacaggtcaccgagctgggacccagccctggctccctccacccggtggcctggcccccagatgttctgctgtccctgcaggtggctctggacctgtcccagcacaaaggcgtggcggtgcgcagggtgctgaacacagaggccaatgtggtgagaaagtttggtgtcaccgacttcccctcttgctacctgctgttccggaatggctctgtctcccgagtcccygtgtgagtatcctgtctcctggcgtcccctctcgtccctccctgtgctcatccttccttcttgcccagaggggctgcccgcctttcacagtggccaacatgttctttctgaagagccccctcaggagaagctgcagtctgctgtctgcggggccagcgcctccaccgtcaggagcctgggcctgaaacgctaaccctgttccgcagctcagagwcctcaaaggcctcagccccccgcacccagtgtcgcctgcaccctcattacgtccccaccacagccctggccctcttcyccaccctcttctgttcgcaggcagactcattggcaggctacaggcctggcaagcactcgtatatgcctgaccctccctccctttggttttctaattgcagaaaagttcattagcagccagacaatagccagttccaaaatgccgagagaaaacaatcaggccagcctcagcccctctgccaggctcctgctgctgaatggcccgttaatggcaccagatggtgccttggtgccctccctgggcagatgattgatgtcagccaggccccgcaggcaggagcattgggccagggaggcaaggcttgcctgtggtgcctggtgagctgctcctcggggccctcagtgccgacccacacggcgccgggcagggtggccacttggcctcaccctggcccagatcacctgctagagggcccaggaggtgcgatgccaccaaggacagggaggcactcgctttccgggcaggcccagaaagtgccagtgatggtggggagagaargcattgtctcctcyctcsgagttggtggaggggaaaattgtttgtgacgatgctgcctcccgagccatctgctcaccgagaaacccaggatggtggagtggaatgaagccgtgcgtcccatgccagctcccccggggcagccctcacgctgctgctggacccggcgtctctctctgcaggtgccctggctgtgggtgagagggaatatgcactcaggaggtatcccgtgccctggaggactcctccctgtcggaaaaaagaaagaaacccaaaaagaccgtaaaaagatttagagaattctggaggctctttgtcattgttgctacctgttttttgaaaaatcccatatcaaactccctggacttcttagggggtaatgtcacttatagtacctcagggcgagcttatggatgggcagctgccatattgaatctcggggtccttggggaagggagtcacactccgccgttcctgtctgtgggcaccgggctgtcccgtgcctttccatgccctgcctggagccagagggccactgggggaattctygggcccarttgccttaccaggtgaggtttgacatcaggctggtgtcagagaggctttccagagcatgtgcagtgattagaagggttacagygaggcctgggtgccgtcttctggcctcacagaggacaagatggaatctcgttcacatatttaataaaccttcctgtccgatgagccacccttcttcctcttctgacattggttagctctaatcttgttctctgcacttactgcctctcctccctggttctgtgccctcacaggctcatggaatccakgtccttctataccgcttacctgcagagactctctgggctcaccagggaggctgcccagaccacagttgcaccaaccactgctaacaagatagctcccactgtttggaaattgkcagatcggtaaggctacgcctggttctcctcacttcttctccttcctctgatcacagaccaccacaccttcacacccacgccctcttgctcattcttcttccttgtcatatgattagtgtgtacattctgagccaggctgtcccccaccctggggtctggccatgctcagggaccttcaatgtgtgggagcggcatttagctgcggtgcctctggtgtctgttgcggggccggggctgactggggaatgaacaccttccatgcccacgctccttcagcttaactctgctcacaaatggggaatctgcgtgcaaggacactctgaggcctccagaccaacttcccacccaagcaattatttgtgcagtcaatatttttgagtactyactatgtgctaggcactgtggcagcagatatgtacaggcagatgcattctctgcttgtgcagaccctacagcatacrgcatcccttctaggaaggcacccaacctcacttgaatgcctgtggtgtcagtgagttcactgccttttcaggtcacctgtgtgtgtgtccacagtcgtaagcatgagagagctgctcttctctctgaggctcgttgccttttctgttgtggttgggcagtgagacagagctgtagacctcctgcactggtaccagctgcataccaggtggaaatgtctgaccagggagctcagagctggccaggacggtgcccctcacaaggggatgcacgagacagtgggggaaaggtgattgcaagaaggactttgcatcctagcatgagggactttaagggtggaaagtgccaaatggagagacttttagtagatcaagggagaaggaaagagagagtgaggggtggtgtaatcattatgatcattccgtcattrtgaatgatcatcataatcattcgatcattacagttatgcaaaccattgacgttcttgtaatagcttgggctggtgtatgtgccaggctctgtgctgggcaccttccctrtgttacctcattcagtcatggggccacttctggaggcagggcacaggaatggagaggtaaactgaggcccaaggacascaaagtggaacacagaggagaccttgccctgaggaggagcataggcagccacaatgcgtaccccattagttgaccttattggctctttccaacctcaggaggttgtcatggaggggtcaggagcaagtcatgtgttttacaggtgagctgactgaggcccaggaaagtcaactgagttgcccaagctcacaaactagctcacagtcaaactgaggtcagaacccaggtctcaagagacaggggaagaggcacccaactttcctggcccctgccatcagaaccctgagcctggaccccagcatgatgggcctggggccagcatggagcctccggcccttccatgagggctgcggagaggtgtgagatgggcccacctaagatgtgaggtccggcagctgtgagcacatcagccctgaaagaaatacaggccctgcttcccctcctgcccccagtcgccatttcccagmcttggtgggcagctaaaccctggtctttcagagagggcccagtttttccagagccatgtcrtgtgtatgaacctgctggtctgattatgtctagtggtcttggctcggagctggcctgattagtgagttgcaggaggggtggctgtgggcctggagagagaaaactcctactccctgccaggagctgctgagagttttttacatttgtgcttttatttgatcctctcagcaacttacctgtgagcaatgtgttattcatatcttacagatgaggaattgaggctcagagaaattaggtaatttacccaaggtcacacagcacatttctggcagaagccagtggtaacttacaagactctgtgaccatcagcagtgccccttctcttctctccctttagccctggatgctccttgcagcccctgcaccatggtyaatacttctttctctctctatctccctctgggtcctcagctccaagatctacatggctgacctggaatctgcactgcactacatcctgcggatagaagtgggcaggttcccggtcctggaagggcagcgcctggtggccctgaaaaagtttgtggcagtgctggccaaggtgagcagggccatggcttcccttgtctgtgcaattctacggatggtcagtgtgcgttsctgtaagctgggcaccccgtcagcccctccctccagaagcccatggtctggctggacacctggacccacagctctccctgtccaccataggtgataccctccagcctcagccataccccacaccagccccacactgccagggacaaccctgccccatgcagcagtgtgggtgggacacagggcccgtgccccccacctggggatatttccagctgattcagtgactgtggctctgcctgcctgagtcctcagtcagagccccagtgtggcttcccacccctttctgtggtcactgggaaagcaggacccctaggacaccctggcgaaggagaggatgctcttctgatactccttgcttccctcccagtctgacccgatccctggccctggccatgccttccttattcctttatagtttccccgggaaggtggctactccacgaagggtagctcctatttattgaggacttgatgtttgtctaggatttaatccttttaactactctgcgaggtgggtggtttattttgtcctccccgatttaagaggcccagggagctcaagtgccatgccttcgttctgccagcctgaaagtgttgtggtcaggccttgagcctgtgctccttcctctctgaaggtgagaggtggctgccattccctctctgcgcccttccctttggttccagatcctggccattgcgtccctgctggaaaccctggactctgctgctcagtactgctgagtcagatgtggctctgggcgcttcgggtttggccgctggctcagcctcccttggccctggggccyggatctgagcccaccctcctcagtgtgggtctgcaggaagctggggctgccctcgggtgatttgtgcytctccttgggaacttcctgccagcctgatscctccttcccacctccctgtcctggccccctggcttggtcacatgaatgcgtggtgacactgagaggrcctgacagggacatttcagcctaaggcaggacagtcgttggcccctcactgaagtcccatgcaaaatgagcccttgttcttcagtccattgccataatagagacctttcctccaaggctgagagctgtttggtcctcacagtgcagaggcctggggttgacaacctagagacttagaggggaaaaatccagaackgacccacgtacagtccctcctcctgacccatgagggagagcacccagcatgctttcccggcatgcctcagacaccccaccaccctagtccagtactctccaaaggagtcaccccaggaagatyggcttgtgtgtcactcgcatctctcagctgtgctcaaayctgctattttctttgtccccagtggggctgtttgcagccggtatgggggaaaagaatgagatacagaaaagtccctgagctgggcagaggcatcaccccctctgtgcctgctgagtctctgccttcagcaagggctgggaatgagcttgagatgaaggtgcctgccctgccagagccagggccctcggggtagggctggcagtggggtggaggacagagggaagccaggtatgccccgcagtagcagcagaggcatcgggggcatgggcctggagaccctctgtttgggttttgcccgcacatcccctggggtctgtagagtattctggcccttgccttgcttgggtagcttcttcctgaatagtagtatcctagcagctaycatttcttcagccctgccggtgcctgcagtgttctttgtatattagctcctcattctgtttctcagagaagattccacagcatggcttctagtatgatctccgtttcatagaaggtgaaacaaagccccagagaactaaagcaccttgccagggtcttccagctagtgaggggctgggcagggagccacacccactcgcatccagcccatgcccattaccaccaagtgcatggtgctcacaggcccgaacscctaagggtgccagtggacactgctggctccccctggctagctgccagccctgcaggtgcccggtcagtcaggaggccctctgcatgtcctgccggtgccttcccacccrgcctctcccagcctgtgctccctcctgtgagcagctggtaggagtggccactgggtggcgtgtgggcaccagggtttccttgctcccagttgtccagagctccttaattcatccatcyttctggcactgtcgccttagaaggcrgaagtttctaagtcaggatgatggcaaaggtcagtgagaaatgctgacttcaagctgtaaatttgtgtgtgagttccagaggcccgtgtgggctcaccaggagggcacgtgtcaaagcgtggtcttttcyggccatttctcactctgggggaaggtgtccagcccaacgtttgataggaatatttaatggctttctcagaggaatggatctgttagcaggttttcctgttcagttaccattcgtgtctccagtatccttctcctctcaaatgtttgtctttgctttctttgctgtgaktttctcagggtcctcatcccctcggccagcctctttgtggttttatctgaycagcctgctgctgtgtccctctttctcctgccctccgccccttgtgctgtgcacgtgcacacacgcacacacacacacatacacacatatgtcctcctccctggagtccttgtggttttaaagtgctgatactaatcggatttgagttgacttattgtcagagtagcttttcatgctcctcagataccactgggagttaccatcaagatctggatcttggctgtgagcccctggcctggctggtcctcactggcagcccatggaatccaaatgaaaggtctcgtgcccacctaacccagctggccagtcagttggcaagtcagctctatccgaggaccacccaaagacaggactgtgtggcccagggctcccagcagccctggcaaggggcacaagtgctccagccttcctcccagtggtggcacatggtcggggggtgctgcacaggagcctgaggtctgagagagggagacttccaggaccccaccccatttagagcgagcaccttccctaccctgtcttctagccttaccaggtgtcccagagcaaargtagtacagaagtcatatttgtgtcttagttagaatgttttcctggtggttttggaactttgcacaacctcctccccactgccccccgcccccygccccccgccttcttctgcatagcttcctaccatctgcaggacggggaacttggggaattgcttttcactctccagcttcygcttgttcctccccacagtatttccctggccggcccttagtccagaacttcctgcactccgtgaatgaatggctcaagaggcagaagagaaataaaattccctacagtttctttaaaactgccctggacgacaggaaagaggtgagtctgggaagcaaataaagatctctccatcctccgtatttatgagagtgcaaggggttaaccctgtcatttctgaccttcttcgccagtttgcaccagggagtcagtgatcttsgttgggtcctaacaataatcaataaatgactattgattgagctctytatgcgcacatctcatttaatcctcataatgttagtggaaggtagatattctccccatttagcagatgaagaaacagtactttgaaaaggttaagcaacttgtctgggttcatggagccagtaagtgtttgggctgggatgaaaacttggtgagaccccagagtttttaacaactaccctgtgctgcctcttagtttgtggtgctgctcagcatggcctccctggccctctccagggcaccttctgggctcctgctcatgctgctatttgcaaaagtgggtcactgcagccagcagaggtgtaaaaccctgtagacttgtagggtgtcaaatctcgaagggacctcagagataacccccttgtgttacagctggggaagttgaggctggaacgggatgcagcttgatctgggtcacagctttttaggtctgctgctgcttcagtgggtggaactggtgaaagggaaatgccaccttcgaggtgatagactgagggacctcatttgtcttagggctgtctcctagaagcttctgtctctgcctctcccatccttttccttctccatatgtgcactcacactcatgtgtccctcagggtgccgttcttgccaagaaggtgaactggattggctgccaggggagtgagccrcatttccggggctttccctgctccctgtgggtyctyttccacttcttgactgtgcaggcagctcggcaaaatgtagaccactcacaggaagcaggtacgtccaggacccgttcaccccactgtgcctccaaccctgctctgttcggccctccaaggggagagggggcagggaagctcccttgaattgccccactggctcccagctgccagaagatggggagagtcagccttggggctctggctggattgctctatctgcaggtagccccacacggccagaatagaaycaatcccaggagggagcagactttaggaattcaaccagtcctgttttcggccccgggagctctggggctgaggcttctccctgtctttctccgggcttatagtttgctttgctttcagtcttcatgaaaaaattgtgattctatttttttatactcttaacaaagaaaaaaacgtgtattttacagtttacatagctgatacatagcaggtgctttgagcaattttattgcacttcccactgaaaaacaatttcctgggggaagttggggaaacacgtttcccctgctgcctcggattgtccacaaactgcaccaccatgttctccggccacgctgccccacacctgcttttgaagactgaaaggatgcgcatccaattcagtccacactgattgaggaaccaggtttataccaggctgcggcttggcttggaggatagatacatgggtgaaaagggcgacagtgcccgctcttggtggacctctagtgtgaggcagggggacagagaggcctgcagtgcatcagggctagggccgtggtggagagaaagatgtggggtgaagagagggcaggctsgacgccattgggaaggggcccgaggccttacggggtgagttgaggggtgatgggtgagtagggattccgccaggagaggagcatcccagcagagggagcagcctgtgtggagccccgtgaatcagaggaactgccaggcagtggtgtgggaagccagtgtgtatggagcatctccaccatgccatgtggcgctgcaggtgccggggacacagcagcatatgagacaggtccctgcccccacagggccagtatctgagtggcaggagacagacacagagggatggcttcagccatgatgacgaatgctgaggaagacaaagcaaagcagtgccggagcgggtgctgtctggagaggggtctgggaaaggcttccctgtggagggcccggtgctgggacccatgtggagaggagaaggcagtgtgggacgtctgggaagagagtctcccaggctgtgttggtgtccttgggctgcactcacaaatgtcaggctggggctcagccagtagacgtctgttgtctgagttctggaggctgaagtgcaaggtggaggtgtctgtgctggtttcttcgagcctctccttggctgggcggtggtcgtcttctccttgtgtctccgtgcagttgtccctctcccaatccatgtccaaatttcctcttcctgcaaggacaccagtcctattggattagggcccaccctaatgaccttattttaccttcattacctctttaaagaccctgtctccaaatacggccacattctgagaggctggggattagggcttcaacataggaatttggggggacataattcagcccatagcacaggctggagaccagcaggtgcaaaggacaagcctggtgtgtgggcagcactgaaagaaggctgctgtggccggagggagggaggtgaggctgcagagacaggccgggggcggaggtgagcgctcgtgggctcagaggccttggcgagggcagggtttggaggttggtgttggcattttgagaagccactggagaggctaacggaagtgacagttggttaacactttagaaaggtggaggatgggctactgcaggcagggggaggcagggcagctgaggagcaagctgcatgctcgcccagcagtggtggtcgggcctggactagggttgtcagtgtgcccctggaggaagtggtcagatttggggatatgttaaaggcagagctgagggacttactgatagattggaggaagggtatgtgggaagcaggactcgggtggactccagggttgtggggcctgagcctctggtggatgatggtcccataagctgaggagtcaggggctcgggttgggatggtggaatcaatggcccgctttgtgtcaatagacctcccaatggaggtgtgcacagttgagtctggagttccagggagaggtggggaatagagagattagctttatagtcattagtagcatcagagctcaagctgtgggactggatgagctccctggcagggaggtagagaagagtgctgaggactgaatcctgagcatcaaaccaccagcaaaggaggctgaacgggggaggccatggtgatttcaagggggccccagagtccagtgtttcaagatagaggtgtagtcactggggccagtgcagctggaggtggcgcaagatgaggacatctctagcaagggctgtgtcggtggagtagtggaggtaatggccttgttggattcggctgaagagagaccaggaggcaagattctggagataatgagcaggaactggggcatgactgggttagagggaacttctttatgatcatccttttccccagttggaatgatcccttatcaggggataaatggatgacgcagtaaagaaaaaacaytaacgggagtgaaatcctggaggtgaggagtggggtaacccgagcagcagcggagacagaggctgagcaacgccagggccgtgtggtgaggccttgtggtggggaggtgggcacctgtgctgggtgcagaagaacaagctgagaaggcagaggagagagagagaggcaggtgtgggctgctgcgggtctcaccttgccaggagtgaggagagtagggtgccaacgtcctgctgcgtggaggggtaaaagcaggagattggcttctaaaggcctgggaggtttgcggtaggaaggagcgagcttggaggcaagcaccagcagccctggagcctgagggtgaagggcttaggaggggcgtgttggattaggagtggtgtcctcagcggggagcctggtttcagttagagcaagaaagtggggctggttaacaggtctttgctgatgccagtccagagggtccagtgggtgggagggggtggggggaatggaaggggagagcgaggagagatggagacagattaggaagggcatgtgcaggccaggtccaggcccgagggaggtgacgcatggtggaagcaagtcggacaggcagcatgagtgggcaggggaggaagggccaggggctagggcggtggccctctggcccctgctgacctctctcaccatgtcacaaagagcctgagtttcctgccaaggagtgtggactttgtcctgggtgtgagtgacaggcacccaggttagtggcagggaaggggatccaggtttaggagttttggggggatggggtctcctgtaaagtgaccatggcaggtagagaagtagacaaggggacactgggcctctgctggcataggctggggtgtgtggcacctgtgcaggggtggccacggcaggatggggggcggcagggtggcctggggaggcaacggctgtggggctggcagcctgaagggctggtgcgtggcatctcctctgccctgtagccaaggccaaggaggtcctcccagccatccgaggctacgtgcrctacttcttcggctgccgagactgcgctagccacttcgagcagatggctgctgcctccatgcaccgggtggggagtcccaacgccgctgtcctctggctctggtctagccacaacagggtcaatgctcgccttgcaggtaaggaaggaccatccccaaggctggagtcacttgtgggggacgagggggtgaggatacttgggagtcttaggccaaaatttggggaagggacactcattgtcccctcagtcacagcccaggcctgttaaccaatgccagtatcatcagccccatttttgacatgaggaagccaaggctttgacactgtaagaccctggtcttcccatgccgttgctcactttttccctgctctagggcccctctctagcctactggggtccctctcccgcctcccctgctccgtcttctggctgttggccccttactcaaactgctagggcagagggagctggggttctctctccctgggaagggtctgatgagagaaggggctggaggagaccaggtcgttcctggaaataccaggcaccggctcccaggagggagccttgccctctgcgttccctcattatggtgcttccttttcctcatcaggagtctgatggctctaacaggcaaacacattaaactccagggagctgggtcgggagggagccatctgtggacaggaggcggtttgtgtgtcgggagggagcggtgcacgtggctgtgacagcctcccggkgkggggagaccagggcggagccgaggttaaaggagctgaatggagcaggtggtggtgcaggcgcctgcacttggtcgtggtctcctggggcctcctatcgaactttgaaaggaagacatgtgcctgtcttctccttcccccaccccgcccctgccaccaaatgctccatttgacccttcagccccttgacctcggcaggctcccagctgctgctggagggccaggagcctgggcctgtccctgagaggccagaagcagggtggttccctcccctctctggtggggtcctttcagaagaaactcaaaattaccaggcacaagctgagagccccctccacaaggcctgatcactatgactcatgactggacccttgactctgcttgttgtcccctccccaaartaaccattctgacttgcatgccacttgctgttgctgctcctgcttccttgtagtcaacaacttgtccccctattaaaacytttaggagaagtgcttctacagaagggatgggctgatgcattccctgggcaacactgcgtgaggggctggtggccgtggctcaccctctgggactcatccagaggctgcctagagggctgggcccacctggggtaccaacagcctgcagccccagcagcatcctgactcttccaagtacccctcaggtctccccccaactatcccttggagcccacccctaccccagagggctgctgctgggtaaaagcaaggattgccatgagcagctgcctcttgcttgaaaacgcattttcccttgaattgacaaagtaacctatttgtgcagtttgtataatttggaaaatgtcagaaaaatgcaaaaaaagacaaacacgagcagaccgaccaaagactgcaaaacagatcaaaatgagtattcttgccctttcccatgtctggtactggggtaaaggctggttgtaaagtccacatagcrggacagtgggtctggccaacaccgggaaatgactgagatggcgctcttcacgcttccctggaaaaccacggagggccggggctgaggggtaggtggatctgcctcctcctccwtgctgccatctgttgagctcccactgtgggctagtgtttgtaatctgtattttctaattacccatcctctggaagggcagtggcgagccctttctgcagacaaggaagctggcgttctgagtggaggagtgtggtctgggtttttgggtgggactgatgtcaccaccagcctgtgtatgcttycctctgtaggtgmccccagcgaggacccccagttccccaaggtgcagtggccaccccgtgaactttgttctgcctgccacaatgaacgcctggatgtgcccgtgtgggacgtggaarccaccctcaacttcctcaaggcccacttctccccaagcaacatcatcctggacttccctgcagctgggtcagctgcccggagggatgtgcagaatgtggcagcmgccccagagctggcgatgggagccctggagctggaaagccggaattcaactctggaccctgggaagcctgagatgatgaagtcccccacamacaccaccccacatgtgccggctgagggacctgaggcaagtcgacccccgaagctgcaccctggcctcagagctgcaccaggccaggagcctcctgagcacatggcagagcttcagaggaatgagcaggagcagccgcttgggcagtggcacttgagcaagcgagacacaggggctgcattgctggctgagtccagggctgagaagaaccgcctctggggccctttggaggtcaggcgcgtgggccgmagctccaagcagctggtcgacatccctgagggccagctggaggcccgagctggacggggccgaggccagtggctgcaggtgctgggagggggcttctcttacctggacatcagcctctgtgtggggctctattccctgtccttcatgggcctgctggccatgtacacctacttccaggccaagataagggccctgaagggccatgctggccaccctgcagcctgaaccacctggggaggaggcgggagagggagctgccatctctaggcacctcaagccccctgaccccattccctcccctcccaccccttgctccttgtctggcctagaagtgtgggaaattcaggaaaacgagttgctccagtgaagcttcttggggttgctaggacagagagctcctttgacacaaaagacaggagcagggtccaggttcccctgctgtgcagggagggcagccccgggcagtgggcatagggcagctcagtccctggcctcttagcaccacattcctgtttttcagcttatttgaagtcctgcctcattctcactggagcctcagtctctcctgcttggtcttggccctcaactggggcaagtgaagccagaggagggtcccccagctgggtgggctggaatggaactcctcactagctgctggggctccgcccaccctgctcccttccrgacaatgaagaagcctttgcaccctgggaggaaggaccaccccgggccctctatgcctggccagcctccagctcctcagacctcctgggtggggtttggcttcagggtggggtttggaagcttctggaagtcgtgctggtctcccaggtgaggcaagccatggttgctgggctgtagggtgagtggcttgcttggtgggacctgacgagttggtggcatgggaaggatgtgggtctctagtgccttgccctggcttagctgcaggagaagatggctgcttycacttccccccattgagctctgctccctytgagcctggtcttttgtccttttttattttggtctccaagatgaatgctcatctttggagggtgccaggtaraagctagggaggggagtgtcttctctctccaggtttymccttccagtgtgcaraagttaraagggtctggcgggggyagtgccttacacatgcttgattcccmcgctaccccctgccttgggaggtgtgtggaataaattatttttgttaaggcaagcattggtgtgttctttaacttgctacttggagacctagtgtccagtctggacagaatgcacagagaccagcctcacctggaatgcagccagactcgatgtccctcagcacacacagctcctggccacagactgcccatagaactgtctgcacccaaaccccatggccttttcatgcacggagacaggcctctggatgtgcagccttgccaccccctgccccaatcctccctgagagctcctgcstcagtgccctgggctggtgagggagragcctgtctgcacctgcctaattccagctcctccaggaagcaagggcttgtttgtcagagctgcagggttggccactcggtggggaggagtcagccaggattagagagcctgcccctaatccggcctgctgggttttacaaggatcagagctgctgataatgaacctcattaagggggagcaggagcctcaatccgatttggttttctctttgacatcttcactctgctcagatggcctgggtgctatgtggagcaggtgggatgccaaggccactcctgctatggggcagctggggctggggagggatggcagtctccctgcatgtttccctcgacctctttagctgcagcgccttgctgggctcctgggttggactccctctctgtgcccctgctccaggcacccattggctccatcctcctggttgtgctctgcaccccctgctcccttgggctggccctggctgggggcctgagagacagacaggaacccacaatcaggaggcaaccctggcctgcaagaggaagacagaggctcccagggccggtgccctgtgtgcccactgcaccaaggccgctgaataagcctgcccttcaccccctaagggctccttgcccaatgccaagtgctggggatttctgtcagcaagccctgtggctccagtgacggtatttctaaagccaaacttagttacctagaattagcgccatgttggaaacactgtcgcagcagcccgggctgcacagtgtgtagcccagcctccaggtccacggagtggtgtggacctcccacctcmcagctgcctctggcagccaagcctcttttcgcccggccccagcccctctggttgataaacgggtgggcctcctcagcagcgtggctgcctttcaccttgatttccccagggctctcggcaacatcgataaaccagcctcgcccaccagctgggccctcccccacccagtctgccaggctgggagctggagcttgctgagtcttgaatgcccttctagatggcttctctagaggctctcctggcaagagagggtcccaaggggagccctgcaaagcaaaggctccttgtctggggcgggatagagaatctcgcctctgtctggtgtgttacctactgggggcacaggaacaatttcctcaaggagacagtggcatggagctttgaaagacgagtaggtgttagcaaggaaataaggaggaacgggggttacgggcagaggagaaagcacatgccaagtcagcaaagaaaagtagaattcgaaaactttttaaaaatattactaaggattttcacaatgctgcactgggctagaaactgaagctaaaacagatacgtggtccctgctgctatggggcttccgttctagaggcaaggacaggttgtgatgagggttctgaaggatagagaccaagcagggagggtgttgaggaggcttctgcgagacctgaaggatgggaagccaggaagtgggaggggtgggggtccaggctggaggggcccaatgtaggtgtagagggactacagccctgaggggctgctccatgcggcattcttggaggtccaagaggggcagcgccaccttgggccaggctcctctccagcagccttggtatggggtgggggtgggaagacccctgatgcagcctgtcctctgggtgtgggggtggaggagagggctccaggggacccagccagccttgaccctggaggaaagtcaggtgggctcagagagagccctcaaatctgggccctgggtcagggtggggtcaagtccagccttgaagagaatggactctggaatctgacgtctgggtttgaatccagcttccaacactcactggctgtgtgactttgggcaagataacttatccycttgtccccatgtgtcattggagataaactacccacctaccagattgttgtaccatgctgggcaaacactaagtgcttaataatggtagcccactgctcatgtcgtgtcgtctcctgtcttgatacctgaaaactcaaggggccctgttgtgcttggaggggggtgccgttcccacaggatattctgtgaagggtgtccctggagctgggyctccaggtggcaagccccaagccaccccggcaggtgccactggccagagttgaactgaggtgttgagtggaaagtgcctccccacccccatctgccacagtagtatggatttccttcatgagatggggctcctaaaatgcctgaaatgtgtatgctgttggagaattgatgtgtatgatttattgaactttgcactcatttaaatctcatttaatcctccaacaacgcaagatgaagaagctgaggcttaaagagattaagaaacatcctatcccctttactcccaccaaaataaatacatttgccctattctcccaaatggtgagaggtagatccaggacttgaccccagatcccacccactcaaccctggagctgcagtctctaccccttctaacacatgtgattctgtttcatgtcctgttccatcggtagagttacacactttcctgagactttatatggtggtgctgctgggtgccagcccttcttccctccaacagtggcagtaaccactgttgtgtgttggtgtcaaggagtggggacaccctgaaggaatccgccttttctagagctctcgctccattccctacatcgaggctgaagtgccctgtctcgggtccttgtttttaggcctcgtttgaaggaggggaagaaaccaggttcgttgggcgtgaccttggctcagctcgtctgtgaaattggggccgcagacttagtttgcgggtccctgctaaattcctctccctcttcctgggattcccatccatgtattgccagctacatgtagagtggagaggagaggtttttcctgcagggccttccagagaaaggattcttggccagaggaaatcacagcctataagatcaatatcctgatagaatcccgggccaggtgtgagaggggagagctcactcacaccagcctgacagtcttggggcagagcgccccataggcctctgcagccccatcactgcctcattctccctcaggtgccaaggaagctccagggtgggcccagtatccttccacagcatccctcctcttccccttcaacacccctttcacccctccctccaccacctctgaaaggtgctccttgggcagggcgataggattcccacccctagctttaagaactaaaccaaacttcaagaggagcaatttaatcttcatacctgactccttgtccctcctcaggcatgctgttgtgcaggacagagccctggcttctcctggatgtcacacctggcctgtctctgacccttgctttccctttctctgctgccctcaagggtcattcacacccaagagggtaagaagctgccctctcatcccttcctctcccaccctgggcctctgccctctgcctggccccagcagcacagtcttctccatagagaggggctgggccatgggaccccagttcctggggtctcggtgacacagttcactgtttgctgcagaggaggccccactcgcagccttggcctctgccctgcagaagaattccctgtaactcactcaccartggccgtgggagccagtggcctcggcgagggtcagttggactgcatagctgccggctgagtctctctggccaccctcactggccccatcactccaggttgcactgctgcccagggggtttgtgccaggcctgggtcacagtggaagagagtctggaaatcacaaggcagaggaggagacctttgccaatgtgagagaacaaagttaaggggcagtccatgggggcattgaccttacttaggtgaggaggactcagggaacatctacagactctagggctagggtgagatcctcctgatagtgctggtagctccagctgctgctttggcaagacttggtcgtctctatactgagagagcaaaagctcttttcctggggctgcatgttcttccataggaaagtgggcttcaggtgctgcctattaaacctcctgcctcccctgctgcagtgctttgatgcctttcacctgtgtctacctgcgaacctctgcccaccacggaagagcagctcacatttggaaggggctaaaatttttacctagtttgaatctgctctgcaatgtccccatcaagttcttaaccatcccgggttccaatggttacagagttctgccctggggagggaggaattgcttagcaaatgatgttgagaatagtgattatttgggggaaaattcaggtaagatctcaccttcataccatataccaaaatacatctcagtagattagtaagctaatgcaaaaaaaaaaaaaaaaaggggaaatataattgaatacttcactgtttttgaaagcatgaaaacaatggaaaatgcaactgatgtgagtaatccatctacttgacgtcacttttaagaaataaggccaggcacggtggctcacgcttgtaatcctagcactttgggaggccgaggtgggtggatcacgaggtcaggagtttgagaccagcttggccaacatggtgaaacccccatctctactaaaatattacacaggcattgtggcacacatctgtaatcccagctactcaggaggctgaggcaggagaatcacttgaacctgggaggtggaggttgcagtgagctgagatcgcgccattgcactccagcctgggggacagagcgagactctgtctcaaaaaaataaaaaaataaaaataaaaaaataaagtaaagctacatatttaaaagctggggaaatatatgctgtaaatatgacaaagggctgtgactcttctgcaacacaccattttaagaatgagctaggtctgcatttattgacctgataaaatgtcccaagaaggacacatttttataaacataagttactattgttatatatatgctaacgtttgtctagaaaaagtctagaaaaatacacactgaactgtgaatagcagttatatttagaaagcaacattaggatggacttaagtcagggctcggactagagcaaggcaagtgaggtgccaggatgcaaaagttaaggagacacctgacctcaggggcccacaactgcagagcccctgacagtgagtgtctcagtagcctcgccctagtcctggctttcacttaaatatgttttcgaatgtttgtaataaaatatttcttttggaaggcaaaaatagcaaggaaaataaataggattaaaggatactaaagcccattcaataaaatttgtaggaggccactgatttggcctaggctcctatgatgtaaccaacagaccaaaccaatatggagtcattcatgctaaatgaaactagttaggagtatattcatataacaagtggctaagtgtcagttacagcctctgagctttagtcaattgtaggtggtcaatagattcagataaggcaatccagttaaactgtatatcccacttgctgttttctgtccctaaattctctctgagtacactgcagccctgaagttctttgaacctgttctgggttctgagggctgtccaattactgaatcatacataaaagccaagtaagattttaaaatttgttataattttggtttttaacaacttctgttgtaaataataaaagcactaaatccctactgaaaataaagggcctaaagactgaatgagagatgcaattttttttggctaacctattggcaaagaaatgatgatgatgatgatgatgatacctagtgttgctggagtgaggggaaatgagatgtatcagttatccattgctatgtgacagccactcccagacttaatggtttgaaacaacagtcactcattttgctcatgaattggtaacatgatcagagctcagcagaaaacagctcctggctgctccgtgcagggtatctaggcacagttcatttggcaagttggtgttggctgctgcctggaagcttagctggggctgtgggaggggcctccagtcctctccccatgggcctctccatgggctgctcagacttcctcacggcatggtggctgggcccttcagggtggccttttcatgtgctagcctcagaagccacctagcatgacttttgcgattttctgttggttgaggttgatgtaacggctcgcccaggatgcagatagaaaggcctgaacaggttcaaggggaggaaccttgggcttcacctttgacgggtgtgacagagttctggaacactgtgagatggaagatactgttgcagccatcttaagaaactacaatctgcccccgccccagtcctctcatatactgctagtggtagtataaactgatacaagttttgggaaatagataattcataatgtaatgtaattggtaatatacttttaaaagccttaagaaaatatataacctttaatccagcaattctatttctggaatttatcctaaggaagtaattgagaatatttagtaaatatttgctacatgataaatatttatagtatcaaagtaagattaaactaaagtccaaaatgggatattgagtaaattctggtacacaattacaatggaatacaatataacatctaaaaatgatttgagggctgggtgtgttggctcatgcctgtaatctcagcactttgggaggccaaggtgagaagactgcttgagcccagaagctcaaggctgcaatgaccgatgatcactccacttcacagagcgagactctgtctctaaacaataacaaataaatacaaattatttgaatgtatatatttttatcctgaaattattttcacaccacactgttaatggaaaatattgttacaaaaacagttctgtatagtatgatcttattttatttatttattttttatttatttattttgagacggagtctcgcactgtcacacaggctgtagtgcagtggcgtgatctcggctcactgcaagctccgcctcccaggttctcgccattctcctacctcagcctcctgagtagctgggactacaggcgcccgccaccacgcccggctaatttttgtatttttagtagagacagggttttaccgtgttagccaggatggtctcaatctcctgatctcgtgatctgcccgcctcagcctcccaaagtgctgagattacaggcctgagccactgcacccggccaatcttattttttaaaaaagaaaatacatatatttatggatattgaatgcatggatgaaaactaggataaagacaccaaaacattaatagtggttaatggtccctggtgggattatggctgtttgtttttctttttatttatctgtattttctcacctttattaaatatttattagtatataattaaacacttttaatgagccaagaatatgaaccgtcagcttacaaaagaagatatacaaagagcaatacttacgtgaaacagtattctacttgttgaacaataatcaaagaggtgaaagattagtgcgatatcatttttatatagtatgcagcagtacagtttggtactggaaaggtgataatgcaattatactgtatagtatatctgagaaataatatgatgatatgtatcaaccttaaaaagtttatgcccattggttcagttattttagtgttcaaaatctatcctaaggaaataatcagagatattgactagaacttggagcaatctacaaatccaatcagaagacatatctacatgggcccaattcccagggcaagagtcagctgggcccccttcctcacccagggccatagtccgcatctctcccttttgcttcccaatacgaaggccaaggggcaattaccatttatcatcacatttgtgctgttgatttggaagagggaaatatttccctgcactgtgtctctaactgcattttttttttttggcttgtttcctttaggcaggttcttgctctgttgcccaggctggagtgcagtgacacaaacacagttcactgcagcctcaacctcccaggttcaagcactcctcccacctcagccttcagagtagctgggaccacaggtgtgtgccaccacactaggctaattttttttattttttggagagatgggggtctccctgtgttgcccaggctgttcttgaactcctgggctcaagcagtcctcccacctaagcctcccagagtgctgggatgggccatattttaagaaaaatggaaaaaagcattatctatatagaagtgaagcatgttgctatgtatttggtatttaggaagagaacatctatgcctaagaatggacctttacttcactcatttacctcaggggcctgacctatagccatttgagttgtgactcttattttagactcagctgatacatcactccctctggcaa

SEQ ID NO: 95081 - DNA, 12756 bp, Homo sapiens
acctggtatcaatgtgcacatctggagttcccatctccttcatggcaaattttcgaatctcttagagtgcccaaggggacacttgttgatggagtattctcgggtcaccacctcattgatggcagaatggccctttttcttctcgccacccttctttgcaggagccattctgccgaatctaagttggaaaggaagaccatttttatctataaagcagatgaaaattttctaaagaaaagttaagtgatattttttttccatgatgtcctcgtttccctgcataagaggacgatctaagactctaaagtagggcttttgactcaaaagccacattgtttctgttatattgctctacctttaattaaataaatcaacacaggccaggcatggccgctcactcctgtaatcccagcactctgggaggccgaggcaggtggatggcttgagcctaggagttcgaggtcagcttaagcaagatggcaaaatcttgtctctaccaaaaaaaaaaaaaaaaaaaattagacagtctcataaccatgtcaatagatagatagataatatagatgatagatagatagatgatagatagatagatagatagatagatagatagatagatagacaggtaaaaaataaaataaagagtccaggcgcagtagctcacgcctgtaatcccagcactttgggagtccaaggtgggtagatcagttgaagttaggagttcaagatcaacatggccaacaaggtaaagccccatctctactaaaaatgcaaaaattagctgggtgtggtggcgcatgcctgtaatcccagctactcaggaggctgaggcaggagaatcgcatgaacccaggacgcagaggtgagccaagatcgcaccactgcactccagcctgggcaacacagcgacactctgtctcaaatagataaataaataagcacaatattttaaaggtccgcttctctctaggttcccatggtattctctccagctatttaatagaaattccatgaccatttaggcaccaagaaggaggggacccactcctagcaccaccagggtaaaaagctttgcatcactccgttcatgtcctctgagaaacagaagccaaggtaaaattagccatgcaagagacttgaacgtttaagtttgtgaatcttctaccttggtagaagcaggtcagatcttgggatttgagtgttgcttcaccaagaagacttcacatctctctgtccttgaaaggagctgtcttcatcttgcatttccttgcctcgtttggagacattctattttgaactggctgaagcctccatccccagtgaagagcgatattattaactctgattgaccaggactgacggtaagagagtgagagttagtgctacatgaattacacagagtgtgtatcaagatgaaaataaaagctgcaatgtgcagacaggaagggtgaagggtccgttgaaaatcagagagattagcaactcatcacattatttgtgggttatcaggagacagaggtaatgaaagtgagacctatatccttgatcaataagagtttgactgcattttgagttcattttcccctgccgagagagagacagcaggcttactattgatcaccgtgttaatccataaccggactgggccttagcctggtggagcaagcaggaaaaataagataataagcaggaactcttgatcttttattatggtgtgctagataaagagagtgtgggggttcaaggtggaatactttatagttaacccttacagtccctcttaatttgaaatgcatgagaagaagaattgcggcccatcttactcggacttttatttgaccttattttgtctgcttcctatctaaagtgtgccatggcctcttttcaaagactggaggctgatttaagtgggccaagggacagccaaaacgacattaggctcagagtaaaggagaaaggccctccaaaccctgctagcaaaaatcaagtgaaattaagcattaattgcgtctgttttttatattttcttatgctattttagagtcactcgatccaagaatatttatgtacatgagttgtcaataatatgtgtcagtctgctgtttcaatagcaagcattatttagtttttcattaaagcatttgactaaagcagtcattgcattgatgtagacccatcttagaaagatggtccaccttttctttcagatccatcagagttcccacctttgtgtaacatagaccccggctataatttaggcatttcctgacctgtctattaaaaatcaccaggcacagtggctcatgcctgtaatcctagttactagggatgctgaagcaggaggatgacttgagcccaggagtgggaggctgcagtgaggtatgatagcttggacaaaagaacgagacttcgtctctaaaaataaaaaataaaatctttctcagtgactcaatatttactcatagtagtttttgctgaaatttagactaattctaccacaactccgattaatccagatgacacctttgtacaaattagaaaaatgtgactgccccaggcaagcacagcctaaaagcaaccaaataagatttctgccttccctcatccctccccaccggcaccactgtgcctaatcctaaacagtgccctgaagtccggcgcagcagcagagaaagcaggaggatcatgtgaatgtagcccacctacctgcaccttgcacgggtgtagttaagtctgcactctgtgtgcttgtcccaactcagctgtctctcatttagaggcttcctgtgcttttccaactgagttttcatccagttcttcaaaatgctcatcctttcacacaagttgcacctattagtaaatggcaacctaagtcaccctggagttaagtattctgaaacaaagggagagagaagtggtgtgggtgtgggcacattagtatgagagagagaatgagagagagagagagagagagagagagaaggggagaaaagaaaacagagtttaaagagctctgctttggaaacatactactcgagctgctctaataagaaaaattgggagatccatacaaaaataacgaatttaagtataaaggaatttaaaatgaaatgttttgtgatgatttagcactttatcattggataatcagggaagttaaacaacctgaatgagtttatacagtgattatgtgggaaaactggaccccaacccaggacttccgaagctggaactagtcatttttgtaagagttagtccaaaaaaagctgaggcagcaaagtctactatggaattgattttcagaaacaggcaatgctgctttgaactatcatacttaatgctgatgataagtaaacgcttctgaagtgggtgagacactgaaagttctccccaaagcttaaggatccagcttgagagggcttgttagtattaatttacattgtgaataaagaaaagattgttgaggaaaggggatttttgtccattttaaaatgacaaacagcagccattatttatctgaagcctccgtaaaacaagacaatcaagtcatgtaacattatttggagatggaagatagaataaatgattgtggcatcagtctagaataatgaataccagaatatctcacctggataagccaaaaactagttgcaaggccttgggaaatttctttgggctttcctctcttccagaatgatccacatgatcatcccagctttaccattctgttgtcttccatagtcaaatgatcctagcagccttctcagcacccatgtgtgatcagaagtaacaactcttggtctttgcagtaaagtggtcaaaaaagaagactgccacccaaagaagaaaatgaagtttgtgatctgatcccataagatgtttcagacttgggtttcactggctcttattttaagaaatcaagaatgacttaacagaatggatgtcaccaaaaaaagttcatggaaacagtcagaaacataatggctttgggaaaatgttcatttctaatttcataaaaatgaggatctaatttaaaatgaaaaaaatgatgtttgggaattgctatcatttgaatgtctgtgtcccttcaaaactcatgttaagacttaatccccaatgcaacagtattaagaggtggggcctttggggaaatgattaagtcatgagggctctgcacttgtgaatgtgatcagtgcccttagaaaagaggcttcagagagctctccatcccttttccccttctgtcatgtgaggacacagcgtttgtcctctctggagtacacagcaacgaggaaccatcttggaagcagaaagcgaccccttagtagatactgaatcagtcaatgccttgattgtgaactttccagcctccagaactgtgagaaattgatttctgttattcatgaattacccattctgtggtattgttatagcagcagaaacagactaagacagattggtttaaaaactgagagagaaaatcctcttataaaaaaaactgtttcgcaccaaaagcatttgcaacaaaaggaaaaattgacaaatggtatctaattaaattaaagagcttctgcacagcaaaagaaactatcatcagaatgaacacacaacctacagaatgggggaaaatatttacaaactatccatctgacaaaggcccaatatccagaatctacaagagacttaaacaaatttacaagaaaaaaacaaacaacctcatttaaaagtgggcaaagaatatgaacagacacttctcaaaagaagacattcacatgaccaacaaacaaatgagaaaaagctcaacatcactggtcattagagaaatgcaaatcaaagccacaataagaaaccatctcacaccaatcagattggtgattattaaaaagtcaagaaacagggccaggcacagtggctcacacctgtaatcccagcactttgggaggccaaggcaggcaaatcacctgagggcaggagtttgaggccagcctgaacaacatagtgaaaccctgtctctactcaaaatgcaaaaattagccaggcatggtggtgcacgcctgtaatcccagctacttgggaggctgaggcagaagaatcatttgaacccgggaggtggaggttgcagtgagctgagttcgcaccattgcactccaccctgggcaacaacagtgaaactctgtctcaaaaaaaaaagtcaagaaacaattgatgctggtgaggttgcagataaacagcaacactttgacactattgatgggagtgtaaattagttcaaccattgtggaagacagtgtggtgactcctcaaagatctacaaacagaaataccgtttgacccattctgtcataaagatgcatggatgtgtatgttcattgccgcagtcttcacaatagcaaagacatggaatcaacacaaatgcccatcaatgatagactggataaaggaaatgtggcacatatacaccatggaactacacagccataaaaaggaatgagatcatgtcctttgcagggacgtggacagagctggaagccgttaatcctcagcaaactaatgcaggaacagaaatctgcatattttctcacttataagtgggaggcgaatgatgagaacacatggacacagggaggagaacaccacacactgggatctgctgggtgttaggcgggaagaaggagggcatcaggaagaatagctaatgggtgctgggcttaatacccagatgatgggttgatctgtgcagcaaatcaccatggcacacatttatccatgtgtgtgccatggtgggttgctatgcagttgttacctgcatatcctgcgcatatatcccggaacttaaagaaacatgaagaaaaaaaataataaaagagttgaagaaaaaaatgttataaatagaaaacagattctttacaaaaaaatttggcaaatatcaaaaagtataaagaacaaaatattcaaaaagcactctggaatctgcaaaccccagtcggtgctgcatccccagccygccgccacgccgcctacaaacaggtgctgatccggcacggcgaggttgcgtggaacctggagaaccgcttcggtggctggtacgatgccaacctgaacccagcaggcgacgaggaggcaaagcgctgggagcaggcgctgccagatgctggctacgagtttgatatctgcttaagagaacaatccggaccctctggacagtgccagatgccattgatcagatgtggctgccagtagtgaggacttagcgcctcgaagagcggcactatgggggtctaactggtctcaataaagcagaaactgctgcagagcatggtgaggcctggtgaagatctggaggagctcctatgatgtcccaccacctccaatggagccgggtgatcctttctacagcaacgtaagtaaggatcgcaggtatgcagacctcacagaagatcaactaccctcctgtaatagtctgaaggacactcttgcccgagctctgcccttctggaatgaagaaatagttccccagatcaaggaagggaaatgggtactgattgcagcccatggcaacagcctctgaggcattgtcaggcatctggagggtctctctgaagaggctgtcatgcagctgaacctgccgactggtattcccattgtctatgaattggacaagagctcgaagcccatcaagcccatacagttcctgggggatgaagagaccgtgygtgaagccatggaagctgtggctgcccagggcaaggccaagaagtgaaggtcagcgggcaggctactgtccccaggagcactgtccctgcccgtcgcttccctctgcccctccctcstgcacgtgtcacactgaccacatctgtagacatcttcaattgtagctgcagatggggaccagtggctcccattttcattttagccattttgtctcctgcacccactcgcttcatacaatctagtcagaatagcacttctagggcacaggttctcagtctaagctgtggaaaagctcccctcagccaagagagtttaaaggtagtgacttgggtttttgcgagtgctttgtttactaaggacttgtggagaggaaccatgctaagccatgaccaatgaggagaagcaagagagcctgtctgccccctggagccagtcccgtgctcttctacagtcagaccactgcctgggggctctagtcattccagtgaaagatggatgtaacctgcatggtgatgtgacgactgtttcctctctgaccccagaggaacgggctctagaaggttgggatcaatcctgaatttagtttaggtgttacttttactttaaaaaaaaatttatatatatagatatatatatatatatataaaatatataaataatacaaaacaataacccttctggggtttctcgtggcagttgaaatagtcccacatgtggtcatcagaaaataagccgttcctcataccaacatgggacaagctccttgacctctgaggggcaggagtgcttcctgctgtgtgttttagaatcccttcccaccttgttttgtggcagtgaaatgcttcttggtcttgtccaagtatgtctttcactgatttctgaatcatgttctagttgcttggccctacaacatgggtccagtgttcatttgagcacaactgtactaaatcctttttccagatcagtataataaaggagtgatgtccaatagaaaacaaaaaattcaaccaggcacagtggctcacgcctgtaatcccagcactttgggaggcagagttgggtggatcacctgaagtcaggagtttgaggccagcctgaccaacatggtgaaacccatctctactaaaaatacaaaaattaatctggtgtggttgcagatgcctgtaatcccagctactcaggaggctgaggcatgagaattgcttgaagctaggaggcggaggttgcagtgagccaagatcgtgccattgcactccagcctgggcgacagagtgagactctgtctcaaaaataaataaattaaataaataaataaataaataaataaagccattgctaacattttatagcataaactcatctttttgtcctatgctcatatatacatgcaaaatcttgacaaaattggaataattttgtaagtgttatttaagttgatttttttcacttatcttgtgtaattaccgttccatattcttgaatattctttgagaagcttgaaattttaagatgtactgtctccttcttctacatttttgttgttgttgtttgagacatggtcttgttctgtcacccacgttggaatgcagtggcacgatcatagctcattgcagcctcaatttcccaggctcaaaggatcctttcacatcagcctcccaaataactgggactacaggtgacatgccaccacacttggctaattctgtttgatttttgtagtgatggggtctccctacattgcccaggctggtcttgaactcctgggctcaagagatcctcctgtctcagcttcccaaagtgctgggattacagacgtaagccactgtgcccagactaaatttaaagcgtagtttccctatttgtaaatggtttggtgttactgggtcaaattataaaatacatagaagattaattttcaaatagccagatcattcggtaattagaaaatttatttcttcaaaaaatcaatgaaataatcatttccaattttgctttcatttaagttatttcaaagtaatttgaggtataacaaataataaaacaagtcctctgtgttgaatggattttgatttctgtgatcaataaagtaattgtagctgtagactgtacacttgggtgccataaggtactgtcttatccatgccatgtaaatatgcagagacacctttgcatcaaataacgtttgatgcccttctaatcaatgttttggcatcttcttttttttaacctggcttttttcactcaatatataacaacctgattttaagtgcttatttttttttcctgtacctgtctcctaaaaatctaagactaatgaaaatgctcactcttgcgtttgatttgccaagcctggacctgctgtttacctggtggatgaagcacttcatcaggattccactgtgctgtggtgaacggaggctttattccaccagtgtggttaataaatgcgcattttcaagagcagctcacatatcctgaagtattttccaggcttaaattaattgatgcatcacaattttgattgataattttctctctgtagtcctgacagccttgtaagcaggcagaagtccatgtagcacgttcacaggaaaacaagtaagatccttcctatgaattttctcctttaaccacagtgttagctaccatgcattgtgtggtaggcattttaaatgtattctcactaactctgaacaactattcaatataggtagtatcagccccatttgatagataagaaaatgaaaatacagggatctggaagccctaatttaaatgcctcctatccacagagcagtatcaactcacattcacttgttttacttagaaggctcaatcagcactgaaggagcaggctttcatttcttagggtgtcaggagagaatataggagcctggaaagaagaatacgtggtcctcatagacaacttccatttgactgtacccacaaatgtatttccaatggaagtcttcaatctccacccatacaacaccttggcatccaagtggtggatagtacctcagtgtttcacggcagctagattgaacattctgtaacagttcttcccctcttgaaattctagaacccctaaaccgtcccacaaatgcacttgacatcaagagggctaatgctgggaaagccaccaaaagcctgtgccattccaaacactgggttgtctttggtgagccccattacacatcagctcatgaagcaagaggcagagtgttgttgaatctgcagaacattatttaagtagggaagtcgatgttacttccaacttttgattgcggtatttccagttctcatttcacttggttccacaatccaggatagcaacctgtatcccatctattttgcaaattcatacaccatggtcgaaagacagaagatggaagagaatggactgatctgttcaaatacatcacacaatcaaagaggtacttgcgaggactagaagaataaaatattattcttcattaaaagttctagaccaataatttcagaggtgcaacaattctccgtgttcttttctctaagccagaaagtagacaaaagaaaacagaaaaaaaaaactaaaaagtttatatctgcattcaaatggttttgttttctcattgagaaaagtgtttgaatatgctttcaactttatacttgaacaataaaatatttacaattataatacagcaaaaacctaacagtaagaaaatgagaaatcattctaatctcttaagcaaatattgtcatatgagcatacacatatcgttcactcacttccccaactcactaaatgctagaaaaacgatttttttaaagacataagcctgtaacatgaagagtggacaacaatattaaagtagtaaaacttttggagcaggaaagcaggtggaagactagtaattgaattaacatatcccagaaaactgatttataaggcaagcctgggggaacctatgaaccatgtaatacgtaatatgcattacatgagagactctccaagtgtgcaggtatgggtggtaccaggtttccctgagacgaaagtaaagggggcgggaaatgggacagtaaaatgagaaaaacttctttaaaaatttgcttaagaataagtcagaaaggactagtatccagaatctacagaaaacttaaatcagcaagaaccaaaaaaaaaatcacatcaaaaaatggacatgaatagaaaattctcaaaagaagatacacaaacagccaaaaaacatgaaaaagtgttcaacatcactaatcatcagtaaattaaaccacaatgagatactaccttactcttgcaagaatggccatgatttaaaagtcaaaaataataaatgttggcatggatgtgttgaaaagggagcacttttacactgctggtgggaatgtaaattagtacaacgactatggaaaacactatggagatttccttaaagaactaaaagtagaacatccatttgatcctgctatcccactactgagtatctacccaaaggaaagtaagtcatcatatgaaaaagacacatacacaggctggtctatagtagcacaattctcagttacaaagatatggaaccaatctaacatgcccaactgccaaaaagtggacaaagaaaatgtggtatgtatatgccatagactactactcagccttaaaaagaaatgaaataatatcttttgcagaaacttggatggaactagaggccatttactctaagtgaagttactcaggaatagaaaaccaaatatcatatgttctcacttataagtgggaactaagttatgaggatgcaaaggcataagaatgatataacagactttggagcctcgagggcccaagaaaagattgggaggtgggtgaaggataccagactacatattgggtatagtgtacattgattgagtgatgagtgcactaaaatctcagaaatcaccactaaagaatttatccatgtaaccaaaaactacctgcaccgcaaaaactatcgaaagataaaaattagcccaggcacagtggctcatccctgtaatcccagcactttgggaggccaaggcgggcaggtcacttgaggtcaggaattccagaccagcctggccaacatggtgaaaccgcgcctctactaaaaatacacaaattagcagggtgtgctgtcgcctgcctgtaatcctagctactggggaagctgaggcaggagaatcgcttaaccacagaggcggaggttgcagtgagccaagatcatgccactgcactccagcctgggagacagagcaagactccatcccaaataatgataataaaaaatttaaaaaataattaatttaacataaaataaattgcttaggtcattttactaaaaaaataataataacaagtcagatctctagatctcctcaccagctcacatagccaagaaatgtcccaacacaaaaaaataaaaaggacccaaggatcacagccacattagttttctggcttatgagaaaagaaaagaaaactcagataagtataggaatagtgttttaaggctcatgcatggaaatggcatgcatctcttctattccgtctccgtgactcacatgagtatatctagttgcaaaagaccacaggaaaatttagtctctggctgctcagccatatgcctaacttccttaccatcaaagaaggggagaaggaattttgatgacattttgagagcaggaccaaatgtctgagactctaaattccaacatttaacatgggaatattattcccaaaaggccagatgggacccgttgccttttgttgttgttgttgttgcagttgttgtttgttgttgttttgagacacagtttcactctgtcgtccaaggccggagtgcaatggtgccatctcggctcactgcaaactgtacctcccaattcaagtgattctgctgccccagcctcccacgtagctgggattacaggcacccaccaccacgcccggctaatttttgtgttattagtagagacagggtttcaccatgttggccagcctggtctcaaactcctcacctcaagtgatcr

SEQ ID NO: 95082 - DNA, 63738 bp, Homo sapiens
caagatcgtgccactgcactccagcctgcgtgacagagtgagactctgtctcgggaaaaaaaaaaaaaaaaacccgcaactttctttttgtcatgctttgtgaaaaaatgattaaagcatggttttctgagcatcaagattatggattattacagattatttccatcattttcttaagtcctatgtttttcaaattctctataataataatgtattacttttgcaatcagaaaaagaggtactttacaaaatgtttcattaaagttaaatgtctataaacttaaaacagtatacctgatctctactgatctgcttgtaccttctacgtgacaccacgtagtttctttctgtcaatggctgaaccttgcagactttatttacaaactaggaccaaatgacttgtattgtgatcatattggtctgcacctctctccatccaaaatgatgaggctaggtccattaagcacacaccctggcaaacaacatttaaaatatcattactgaaatgactatgcaggcttttcatcagacttttacagcaccacaaagaaaagtcagagcaagaagatgactgttagaaaaactccagtctcttacaccttcttttagccccaatcacatggtgtgcagcagatacttttaggttacacagagtaaacctgaaactgcaatctgcagctatggtgtgcaatgtgatggtggaaaaaaaaaaaaggtttctttggacacttgaaatgttcatgcaaaaggtttgagacccatggatgaaaggtaagtaaataccgcaggacatgtacattgtactacagccagcatagcataattatagtttgcttttaaccttttgaagcctgtgttttctggttttagtctcttcgcttttcaaattattcctgactcattagcttttcaccctaggggcaattcataagctccataaaagtgtggatattttttctttttctttttcttttcttttcttttcttttttttttttttgagacctagtctctgtcgctcaggctggagtacagtggcaggatctctgctcactgccaacttccacctcccgggttcaagtgattctgctgcctcagcctcctgagtagctggtattatgggccatgcccagctaatttttggatttatagtagagatggggtttcactgtgttggcaaggctggtcctgaactcctgacctcaagtgatcagcccaccttggcctcccaaagtgctgggattgtaggtgtgagccaccacgccaagccgtggatatttttcttaaatttcttttccagcaaatgcataccatttgttttttagtatcagaatgtaaattcccacagtgagaagcaactaaataatacttattttcatcttttatacccttttttcttttcttttcttttcttttgtgtgtgtgtgtgtttctttttttttttgagacagagtctcactctgttgcccaggctggagtgcagtggtacaatcacagctcactgcagcctcaacctcccaggctcaagcattcctcccacctcagcctccctagtagttgggattacagccatgtcccaccaggcctggttaatttttttttttattacttttttttagagacgaagtctcactatgctggtctgaaactcctgggctcaagccattctcctgccttggcctcacaaagtgttgggattacaggcatgagccaccaaacctggtcctatctataattaaaagcacgtaactgaagaccaattcttcattacaactggagaccctaatctgaagaggctagttgggagcaaggtggtgtagacactactggtatcccaaccacggaccaattgacactttgggatgaataattctttgtcataaaggtttgtctttgcactgcaggatgttcagcaatatccctggcccctacccattagatgccagtagcacagagctccaacacagagatgtgaccacctaaaatatctccagacactgccaaatattcactagggaacaaaatcagcttgcttgagaacgattgcgttaggccaaagacctcacaaaatcaaatcctctgtgcctttgccaattcaaattgctcctttaactccatggtcaactctacccacttagccacccaccaacataaaatacagacacaaacaccctcacattcttcatatgaaataccttgaacattgtctagtgttcttcctctgagccatatgtggccaatttggctaagaggagagaagtaaccactgatgcctatttcctaccctccactgacatgggagttcatgcttatccttttaaatgtatttaagttcataatgtgctgactttctttctttgtttctttttggagatggagtctcgctctgttgcccaggctggagtgcagtggcataatcatacatgactgaagcttcaaactcctggcttcaagcaatcctcctgcctcagcctcctgagtagctgggattacagatgtgagccaccgtgttggcatgtcttgacttctgaagctctaaaatgcctccagcttctttatccactagccacgctctgtaaatccatgctcctccataaattttgtttgaccataatattatttaattaactatgtctattctgccttgaaattgttttcttcatttggcacttaaatatacagttatgacccaagctcaagacagctatttcctgaagttattctagattagatcctattaattaaaactgggagtagggatttttagaatcaaaccccaaaatccttttttcctaaaacattccaaaacaatgagacacgtyagcttatataaattttattttcgtgcctcttaatacctttgagggatgtttattctccccactaccagccgtctggtgtttgaagcagtgaggaaaatggtcagagctaattgatttcctatatggagaaaacattattaatgaattcttcactgtggaaaattctgaaaagtggatctgccattactagattcatagccttgagcaagcatgttaatctctcctaggctatttcatctttggtaaaatgaggatgctgacatctaccctctagggctattatattgaatgaaatgacctgtttcaagcttttagccctgtgcttgatatacaggtgttttatgagtgtcctttttagtgctgcttctcttctttgtttccagcacttgctaaatactttctggggtccagggcaaaatgaaaatatggggcttccttgttaaaaaattaagaatttcaagacaagagcagaatatgaaatcaagtgttgagccctatgtgactgcctacrtcacatactcatcaagccagccctgcttgctcccctaggatttccaagggtctacttttctatcctttcacgaaattaaaagccactcttcaaattaaacaacggatggggaaataaatgcaactaactaaagagggcttgattacgtgcattgttttttaacactgtctcacttaagcaacatgttgaatgttagtgagcctagggctcttctagagagaccgttttcatctgccatagtattttagtgtttatatcattttctatctggaagaatgaaaagaaaaacaaactttggttgtctattagtaatcagaccactgaatgttgtccaagaagcacttagtggacaaagagacactcaattcaaaagctctctatgtaggctgggtcgcggtggctcatgcctgtagtcctaacactttgggaggccaaggcgggcggatcacttgaggtcaggagttcgaaaccagcctggccaacatggtgaaaccctgtctctactgaaaatacaaaaattagctgggtatggtggcacacacctgtaatcacagctactcaggtggctgaggcaggagaattgtttgaacccaggaggcagaggttgcagtgagcccagatcgcaccactgcactccaacctgggagacagactgagactctgtctcaaaataaataaataaataactaaataaaatgaaaaaccaccaaacaactatctagacttatcaaacagctttcacaaagatagcagcctagctctctgaacaggtaatttataacctagatagcagactttgaaagaactggtccagacatctaagaattaaatatgcaaagaggaagattttgtttccaaaccactgagacccagctctgcttgttattcccttttcttcatggatgcatcaacatatcctttaaagcaggggtccccagtccccaggccatggaccagaaccagtccctggcctgttaagaaccatgccgcatagcaggaggtgagtagcgggcccgggagtgcagcttcatctgtattcacagccactctccactactggcatgactgcctgagcactgcttcttgtcagatcagcagcggcattagattctcacaggagcctgaacgctactgtgaactcgcatgcgagggatctaggttgcatgcttcttatgagaatctaatgcctgatgatctatcactatctcccatcaccccagatgggacagtctagttgcaggaaaacacgctcagggctcccactgattctacctcattatctattaaaatgtaataataatagaaataaagtgcacaacaaatgtaacgcacttggatcatcccaaaaccatccccctcccttctgtctgtggaaaaattgtcttccatgaaaccagcccctggtgccaaaaaggttgggaatggctgctttaaagggtttctcaaggttctaatattttatttgataagaagtagaatcatataaaaaaccaaacatatgtgttaatttgggtatttatacagatatagtgtatatacatacatacaggcatggaggaatttccaaatttcctctattgtaaaacatacacatacacacaccaacacacacatgcacacatggtatcctaatagaaggcaaggagaatagacatttactgagcacttcctatgtgccacatgttttatatacattaggatattacagtatatggtagcttttatccattcattcaatctcaatacttttttttttttttaagagtagagcaactgaggctcacagcagttatgtaacctgcccaaagtcacacagcatgatggagggtctggattggagattttgtctgactacaacactcatgtatcaaatcctattcagttttgatgttaaaaattctgtggttgaattcgtcacagtgtctttaaataaaacaacaacaaacaaaacacagcaaaccttaacatagttgctaatcatatgagtttacaaggccacctgtgtctttactatcagttacactccttcccaccccatcacattaatcactcaggtctagggatttgcaagtttgctaacagccgaatggaacaaagacaaaacgctaaaatttgtgatgtgggcctaactccaaagccttcaagaaaaaaaaaaaaaggccaggcgcagtggctcatgcctgtgatctcaacactttgggaggcctaggagggtggatcacctgaggacaggagttcgaaaccagcctgaccaacatggtgaaacctcgtctctactaaatacaaaaaaattagctgggcgtgatggcgcatgcctgttaatcccagctacttgggaggctgaggcaggagaatcgcttgaatccgggaggcagaggttgcagtgagccggtattgcgtcactgttgcccactccagcctgagcaacaagaacgaaactccgtctcaaaaaaaaaaaaaatagccatttgtgctttcaatctctccgcttccggcctccacccggcgggaaaaaactcccgcacgtgggcctccacgattccttggcatgcgtgtcactctgggcaacaggctggtcggccacgactgcgcaggcgagaggcacagagcgactggagactgtagtcccccggtttccctggagaccaggcggaagcggccggaagtagcgctgcggttggcagcggcgggatggagaagctgggggtggagccggaggaggaaggcggcggcgacgacgaggaagacgccgaggcctgggccatggaactggcrgacgtgggggcggcagccagctcgcagggtgcgccgcagccagaggagccagcggcctccttgggtgtaaatgagaagggtggggcaggcggacgctcggggcggcggccactggkgcgcgaccgtccccgccccactcggctcctctaagagagggctgcctccctctgccttgtgttacgcggcgggtacctctagaggaatggcttcacccagcaggagtagggtggggcgcgtccacactacaaatacgtgtcgagggtttatctgcgccgtcctttcctctgtgaggggcgaggtggggcgggaatccctcagccagcccgacgaaaactgcagaggcttctgggccttttaactttggagaagttgaggaccttgtcgctcatttggcagaaggtgggacccggatctcagtcctggcaggaagggatggctcagaacctaggcggagtcaggtccgctgtggtcacgtctccggtgacccacttccagctctggtctttaccttgtaccgcccacctcagggcctggatgtaaaggcaccggttctcatttcctgctggttttgtttcattcattaatttagagacraggtctccctgcagcctcgaacccctgggctcaagtgatcctccgccccagcctctccgtcccgagtagctgggacagcaggcacgtgccaccacacctggctgattttcagatttttttagatcaggtgtagctgtgttgtccaggctggtctcaaactccagccacaagcgatccttccacctcagcttcgaaaagtattgggattacagtagttagccatcgtgcctgrccttttaaattttggaactttaggtttacctgaaagttgcagagctagatccccctagtgttaacataaactcagtacatttgtcaaaactaggaaattaacattggtataatactattaattgaactacacgctttattaatattytaccagtttttctgctaacrttcattttctgttccaggatcccaaccagaatattgtattgtattttgcctgtcttgtttttagccagtgttgagagaaggagtcgcctctgtcattccctccccgacaaataatgacctaacaactttttaaaatcaaagaactattcagtctttcaatttagtgaatatttattggtggtctgttatgtcctagacactgttttaggcactggcgatttagcattaaaccagrtaatcctgctgccatgggagctaaaaatagcccacacttgtacccactggttgtcttttgccattttgtatttcagtttttgttggtttgtttgttttaartgtaagggcatgctgcttagaataattttcaagctgtgtgaaaatcaacgtcatttcaacttttctgccccttctggtttacactaagagctactataaacttccaggtgatagtattagctctttcatcatccattatttatcacattttttcccttcaaacttattactatcctgagaaaaacgcagtgcacraacagtaattaagaggactgaagaccctaccctaagtggagtttcatgtctttgtaatttttcgatgctttcacacataatccaggagaaaacwcgtcactctgcattcttccttcacaggtaccatgttttaaggaactgtcagttgctcagagataataagcagcctgmatttctttttatttctttgcatattgtgcaggagttcatgatcaagtgttgcccacaccaaatgcttcatccagagtcatagtacatgtggatctggattgcttttatgcacaagtagaaatgatctcaaatccagagctaaaagacaaacctttaggtaactgtagatttataatatttttaattgcataatgattagattagcaactcatcatgctcattatatactgatttattaaccttattaagraagattttggaagcagttcttacagtgctttatagctggtcatttttgcttcactaccaagtgtaaattttacaagcctcatttaataagtggtgaatstgagaatagtgtagtcggcagaacaaatgaagagaaagcagaataaatgttacttttctgtgctggttagtagcttagtttgctggtcagatttctttttctcactatttgaaattttacaggctttgttctcaaaaacagcctcttattacattttagtggaagtgttcgtctgtcctcccctttctgaaattatctcttaaattgtgtaacatctaactaactagttggattttgaacataaacctaagtattattaagacagcaaacttgccgtaaaaacataagcatctttttaaataaaagccaaaataaattttatattggatatttgttgatatgctagcttgttttatcatttttattattcatattttaaattgagaaagataaagagattttctttcatgcatgcaggaaagattcctcttttagtgtaagcataaagaacatttttggttcacttgctgctaccctcttgtgcccactttggcttaataaatcccaatccagcctagctgatttactgaagaacaaagggatgactagtttttgctaygccaaggtgagtctaggatcttaaaacttttctaagggtgccaaggagttagaatcaggggacctaagttttttctcctgaaggcatttctgagtagtagcactgtgttataagatgttctgtagataatgcttaataaaaaaactgtaattaagtacgaatgaatgattattgggaagtgagggatatgaatgctccatgtttttgggggaaaacgaaagtagtctttcattttgtttttgttgttgttgttgagaaggggtctcactctgtagcccaagctgcagtgcagtggtgcgatcttggctyactgcaagctttgcctctggggctcaggtgattctcctgcctcagccttccawgtagctgggactagaggtgtgcgccaccatactcggttaatttttttgtatttttagtagagacggtttcaccatgttgccctgggtggtctcgtatgcttgaattcaggcgatccacctgccttggcctcccaaagtgcggggactacagacgtgagccaccgtgcccgaccagtagtgacatgcagtgatgaggccatataatgtaatgctctattaaaggactcctttttttagttaagaaatctavcaatctgattttttatgtagttcactgaggaatctcaaattattattacctttggttccatgattatatttttgggcattacctgatatatgaaaaaactttatataaaaataatgttgtttatratatcaaaattttagaaacaatgtctaatagagaagtggacataaccttttttttctacatgtttgtattttacatattttaggtgaacattactcttacagtggtaagcaagtagtcaacttgtataaaaaaagagcaaataatttttagcaatcttgagtcaccaataaactagaattttttatgcagtctgtaaataaatgatcataatttaatcatttttgatagaacagttcaataagtagtacataactgttagatccctaaaaattgctgtagcccagcacttgttttatatattttatatacatattatattttatattgctttatattagcaagttacggagaagagaagttgagtttttctagcagcaaccagtatttagttgtactcaattattttcatccgttttttttttttttggtagaacatgccctattatatggcagtataaattaatctgcttttatattgtctggaaaaaaatcctagagagatttgatttgtatcttatcactgaagattccatagaatatattgatttaggttcatttttaaattttagaaatgtaatacatagattgccttttgtatatgaataattgatctatcgtctaacttttaattctgtgttattcagtgttttgttatttaataataactttccttcttcaaggagacaaaacaactagagattaaaagtggggtatggaaaaataatacattggtatattataattcataattaggagatagcttgaaaacctaatgtttctgcattatagagatttgatatatggaggctatgttttttaattgagacagggcttttgattcttatcaaaactgattgtcttacaatttagacaaatgtaatacggaattaataatatctttaaatgttttcttcaattgtgcttgggtttctcataaaatattttttacaggggttcaacagaaatatttggtggttacctgcaactatgaagctaggaaacttggagttaagaaacttatgaatgtcagagatgcaaaagaaaagtgtccacagttggtattagttaatggagaagacctgacccgctacagagaaatgtcttataaggttacaggtacaaatgataagcaatgtacttttagcattaatttttatgtaggatgcctgttcattacatgaattttttaataaatgtaaaataacataagtcaagatgctttttcctaataacttcttattttgggtcttgtcaactttaaaaattatgtgaaaggataactgtatgctatgaatagtatttttaagaagatgtatagttggaagtaattttaactcttattattgatgtttatataacagggaaaagtggaaaacaaagtttaaaagtgagaaaatgggaaactgtactgtaaaagatgccaggtctttaaaattttaagtttaaatgaattacgaagaaatatgttgttttctaatgcactaatgataattgaaagaggcttctgtaacatttgatcaacataattaaaaactgatttcttatgaaatattaataaaaatattggatatattaatattttcttaggttttatatatatactaaatattacaatgtagctaaactttcctatgctaaggtttgggtttaaatcttagtgttatagtaaattacaggaaaaatgaaaatgagtgtgcactggcacattgcaaatatagtaggttgatgcaaaagtaattgtggctttcacaattacttttaattgcgaaaaccgcaattacttaatatatagtgtaaaaatgtataatgatcagctttgcaattatttgtcttttttactttttttgtttttyttttatgatagcaattttcagatgactggattaaatgtctataatatacaaagacctcttagaaattaacaggaaaaataaacctaataacaaaggacaaaggatatgaataggcagttgacaagaagagcctaacccagtgtctaacaattatagggaaaaaatgctcaaattcattagtggccaaggaaatttgaattagtaagatattttatatctgtcatacttgcccaaaattaaaagcaatgtgagaaaaaagtatcaagaacacttactgagtttaaagatgaatgttcttcaatccagtgatatcattgctgggagtttatcaaatagaaataaaatcataaggctgggtattgtggctcatacctgtaatcccagcacttttggagctgaggtaggaggattgcttgagcctagaagctcgaggctgtgagccgtgattgtgtcattgcattgcagcctgagtgcgcatgacagagtgagactcttgtctctaaaaaagaaagagaaccacaagtacataaagacatatgtacaacaatgtttrtcatagcatggtttatgattgtcaaaagtatggaaggaaaaatgcccatcaagagaaatagccaaataaactaaaacatctgtataatggatattatatagccattaaaaagaattcattggtgcaatactatttgactgatggagatagggcttgttgagtgaataaaaggcaaggtacaaagtcatgtatcatgtttttccaaatgtgtaaaattatggcctaaatgcctcctctcatattcatcatatagatgaagaagagtaaatcattgttttgatttgcagttttccatgagtaaggttgagtattttttcatatatttttggtcatttatgtatttttttctgttaacgtattcacttgcacctgtttttaatttgggttgttcatctttttctaagtactaagtacctagtactttttgtgttaggtattttttgaaaaaagttactttatcaatttttctcacagtatttttctgagttgaagtaggcgcgtagccagttagtcctttactgtatttatctctgatctgtttataaccttattatttatttcatattttgatgctactgcatatatacctttcttcaaggtattttttttttctgtaattacagactcctcttttgggccctatataattatatgtttaataaatgtatcttgcttatgaagttgataccaagaaagaggttaacttcaggaatggaggctgggcatggtggcttatgcctgtaatcccaacactttgggaggctgtggtggggtatcatttgaggtcagtctgggcaatataacatagcaagaccctgtctctacaaaagttaaaaaaaaaaaaagttagctggtagcatgtgcctgcagtcccagaggccgaggtaggaggattgcttgggcccaggaggtcaaggctgtactgagctgtggtgtgctactccactccagcctgggmaacagtgagaccctgtctcattaaaactacagcaacaacaaaaaccttcagggacgggataattagggatttgtcctgygacctaaaatcagtcaatatttagtgatccaccagcttcgtgcatgattctgtatttaacttgcttttctatttagtgcttaaagccttatcctttatttttcttatgtagtattcttttgataaactcttgttttctacatgttactttgcatatcaggtatatacttttgaaaataaattgccgaaattgatgaaggaaatgcaaaacaatcattttctttgattagacatattgtcagtctgtcctgaaaggaggtaatagttttctctaggtaatagttttctcaggagtgatttttggtgtttgccatgtcacattgttacctttattggtttcccctcacattgtcaatgttgacatcaacaaaacaaaaaagcacctttggtgtttgtgaaaaaacatgatctatgtggaatgagatagtccttttatttctgagcttcagattatatgaccttaagaatctatgcatttttgtatactaagagacttgcatttgttttctcttatccagctggtgtcagtagaaagtgattcagagggaagtgaaaaactttctcaatgattttaaagttattagtctcaatgttaatatatgaaaattgatagtttttttgaatttattttgaattttggttcagcttaatctagtaaacatttgacttgaggactagatattgtgctagacgctgggcatttgaatacctgtaagttgtggttcatctctgcctctctgtcctaaggaatattcttgggaatggctaataaaaataccacgttatagtatattttgaaagttgactgactttctgttttattcagtaataattggacattttaaatattattttgttttgcctcttttaaactcttggagaaaatatagctaaaatatactattacttgtttttaactttcctgagcagcctatagtttattctttgacacatttcttcaaggtcaccaatttactataagcattgatatttaatgtactacagatataaaaattataggtgtagaagattgagctagatatattgccatgaataactgccctaggaatgtcatttttagacttttttgaaaatattgcctttatacaagwtgtggtacagaaaaaacgtcaattaactgagggctttattaaagatattatrgaactatgaatgtatataaaacctttaacaataaatttgataaatttttaagcactagatagttaaatttatcctagttataacttcatttacatttgtgctccaatattatttcaatttagaattactggaagaatttagtccagttgttgagagacttggatttgatgaaaattttgtggatctaacagaaatggttgagaagagactacagcagctgcaaagtgatgaactttctgcggtgactgtgtcgggtcatgtatacaataatcagtgtgagtgggttcttattcattctacctactaacyaaaagtacatacatttcttaatgttcagtgagttcgctgtgtgattctgaaagattcatgacttttgttggaggtatagttatatttagtcagtaatctgtctaggacagctaaaattaggtgctgctattccataataagtgttaagattttgatgacatgtagctcaatgctctgtgcacttttcatttgcacagagcattgttcctgttcatctgcacagagcattcatctgtgcagagttttcgtctgacacagtgcattggttcccattttagaaagccatacccagctgggcacagtggagcgcccctgtagtcccagctgtttgggagactgagctgagaagattgcttgaacccaggagtttgagtccagcctaggcaacagagcaagatcccatctcttaaggaaacaaaaagccatacctctgtaggtcattcttaagttgtaagagttggcttcttaatatgctttttggaataattttttattattctaaaacaatctctaagcagagttttcaggtaggctagatttgcctttgatgtgtcttttacatgttcccttcgattcccctttgatgtgtgttttacatgttcacttcgattcccctgagaccctcatgttgctctctgaattcccaagttagcacttttggaatgttgtccagggctatctgccatgtgctagaatcttctccaagctcctatttaatctgttcaaataatctttgtcaaagttagcaagaaagcagaatggtttgtctccttcatatattgagatatgaatgactgatggtgtttccagtgatatttacatttgaaaataagctgcagtaagcaccagtgaatatctgattaggctttcrgacatcttatgactctgctggtgactcccctatcataccacatacaagacaaggtactctgctgttgtgtaagacttgtctgacccttttgctcttaagcctccccatgcatttcctcttatcctcttttttgagaactagacatcggtctacagaatagttctccacagaagaaaagcagtagaaccacagtttctagaatacatggagcttttcctgtatcttttgtacttgtgctcatttgtaacttaaaagggctaactagcaagaatatttcaaatatatttctrtataatttttaaggcaaacttggattttattggttagagtacattatagagagctaggttttatatcccaaaaaggaaatgtggaattattgattaattcttcctctttcatacagattttattaaaattttttgtaaacctacagaaaagttgacagaatagtacaaaaaatacccattatgtcttttcttttttttttttttttttttgagacagagtctcactctgtcgcccaggccggagtgcagtgatgtgatctcggctcactgcaacctccacctcctgggttcaagcaattctcctgcttcagcctcccgactagctgggactacaggcatgtgccactacacccggctaatttttttatttttagtagagacggggtttcaccatgttggccaggctggtcttgaactcctaatctcagatgatccgcttgccttggcctcccaaagtgctgggattataggcatgagccactactcctggcccattatgtcctttcttgtagataaaccagttgttatcgttttgccacatttgctttctcttgttctctctatggattgcttggttggttgatgagctatttggaagtaaattgcagacatcctgacatttcatctctaaatacttttrgcgttagtctctttgaggttaggatggtttcatgtcattccaacactgttttacacctaaagcaaatttattttkatataattttcttacacttttcataaaagagctctaaaactgtgtacaggtcagagattgtttctagcagcatatactgctagtgcgtggttaagatttagatctttaaagtataatgttagctttcttgttatataataatacttctatgcctacttaygggtaaatatgagtaaaagttttgccaatgtcagtaggaatttttttatgagatcagttttcacaatgtgttaattattaagcactcccactacacagtcactatcacaggcccttggaatttgcttattgaatttgtttacagtattcctatgaagcatgaaagagattagtcaagtggataacagggtggcagtgatctcttagtccatttagtgttgctttaacagaatacctgagactgggtaatttataaagaaaaaaaggtttatttggttcatgattcttgtggctggaaaagtcaaggttaggcctctggtgagggcctcaggctgtttccactcatggtggaaggcaaaagggagccagtgtgtgcagagatcacatggtgagagaggaagcaagggctgggggaggtgccaggctcttttaacaaccagctgtctttggaactaatacagtcagaaacttacccctgagggagggctttaatctattcatgagggatccacccctgtgatcccaacacctcccatttgaccccacctccaacactggggatcaaattacaacatgaggtttggaggggacaaatatcacaaccataccaggtgatgatggtggtggttgtggtggtggtggttgttggatatagactaagccctctaccttttaaaaattattttgtgaaaaagaaaaaggtttttcttgtgactttgaatgacatttgttgtttttaaagctataaacctgcttgacgtcttgcacatcagactacttgttggatctcagattgcagcagagatgcgggaagccatgtataatcagytggggctcactggctgtgctggagtggcttctaataaactgttggcaaaattagtttctggtgtctttaaaccaaatcaacaaacagtcttattacctgaaagttgtcaacatcttattcatagtttgaatcacatraaggaaatacctggtaagacaaatatatttgaaaagtacatatacgtyttattttatttcttttaatttaaaaaattatagatacaatgtaattaattcttaggtagagttgtctgtgagtttgtgtgcatgtgtgtgtrtgtgtatacttggttcctggaaaaaactaagaaaaaytgtaatgttttctcaagcaaatttggattaagaaatatgtgaaggtacttttcttattttatctacttttgtatggttagaatatggtcatgaaagttatagcctagaaacatatggtcctttatttccagtccctgggtcatactcttatactgtacattgcctctagagaggggagttcgtcttttactaactcttttgggattacatataaaatattaaggctacaatggactttccaaaacatctaggccaaggtcctcattttaaagattaggaaactgatttccatgaggagttcggtgacctrtttaggtcatggggcaagtttgtatctttgaagattaaatacccaagtttttataggccatcaatatgttgaactacatttctgtggtattgctagggaataagatgttataaaagagttctgtggaagtgaatttctaataccactgaaacttagatgtcatacttcacatttttaactgatacttgcgtgattccaaaatgtattatacactgccttgccttccttagtatagtataactataatttgaagttttttggatgactttggtagtgcattctgaagaacaatgtcaggttgtaataaactgaggactatatactggtgcaaaacattcttacttggctttactttcgagttcttgtatcttttttttttttttttaacaggctttctcctttctcacttattgccaaatkgccaaccttcttttttttctgctgtgaaaaatctgtcactctactttaatagttccccctacatagccatctcctccaacttactgcttttactgtgcaagaaaaccagataactgtggaattactgtttttgaatgaaaagaataaggagacattaaatagcctgttttctcttgtgaataaagtatgaccgaattttagtgcaagaactttgtgacagttttgctagcaagattttttgtttgtttgctttctggctcatagttgtattctggatggtaaatgttagatatgacttatggataaatgtgtggtggtgcgtataggaatcagttaggytacctaatatgtacacttaatttattttaattgctctagtggcagcctttttgtatattaataataatcatgatttctgaatatttctggaatattacataacaggtggtaaaatttttgttttagtaagacagcatttattggctgtctctgtattcattttattttactgcattttgtgaggacttcaaagaggtgcatataattcaggagccctgagtggaagaacagcaacctagtttgcaatggggtttgatctttgcaaaatacagtagtcccccattatctgcagtttcacttttcacagtttctattacctgcagtcaactgtggtctgaaaataataagatattttgagagagagaggcagagaccacattcacataacttgtatattgtatattgttatagttctgttttattattattgttaatctcttactgtgcctaatttataaattaaactttatcataggtatatatgtaatgggaaaaacagtactgtatatatagggtttgatactgtccatggtttcaggcatccactgaaggtcttagaatgtatcccctgtggataaggggggactactgtataaattatagaactyaaagatawgattgatatatttataatattttaattagctttgttttaaggagaaaagctattttaacattgtatgcatttctttttatttaggtattggctataaaactgccaaatgtcttgaagcactgggtatcaatagtgtgcgtgatctccaaaccttttcacccaaaattttagaaaaagaattaggaatttcagttgctcagcgtatccaaaagctcagttttggagaggataactcccctgtsatactctcaggaccacctcaggtacatgatgatacttattttaattaagtactggttatcacattatttgagataaagatttctagttttagtaccatgttcttactattctagtttgcttagtatgtgatccctttcctattagaaggctgatttattattaatagattggattaataagtattcttaaatggaatcttaagcattgatattttgatatcttaagttagctactatgattgaagacagtgcaacttaattttaatagcctataatgcatatatgaggcaaaatattttaatctgttaaaaatcttgttttcagagtagtccagtgatttagcaaatgggaaaggtataatcacccagttaacattgactgatttttttgctatgggacaagcactttactgagtgctttaaatatgttagtccatttaatcttcacaacaaagcatcaaggtaggtagtactgttgtttgtccattccttcttacttctcttctttccttccttccttccattctctctctctcaagatgaggataccgtactttagaaaggttaaataacttgtccaaggataaacttagattcaagtcctaggtgattaagaactcttgccataatcatacaataaagcttggagttggtactagagctttagagttttcataactttgaattattttatattaactgttttatattaactgttaatacagtaatattttatattaactttctagtgagtacaatagcttgcagataaaaaacwgttaatataaaagtgaactaaatggctcaaactaaggacaagaggtaagttagtgaagaatgtattgaatatttatttgactgtacactgataataattagatatagttatttgagtttgtgctaatccttatttatgcttctttgatagtcctttagtgaagaagattcatttaaaaaatgttcatctgaagttgaagctaaaaataagattgaagaactacttgctagtcttttaaacaggtgattttcaatccattttgccaagtcatcctatgtattcattctatatacrgtatgtggaaagaatatttgatgttccatcttggaactgacagattatctggagactaaacaatgtaaaaataatttatcatgggatttctctgctttataaactgttgtaaagatggtaatagggggtcttacctaaattgaattcattggtcttaattctgttaacactgtggttatgctatggatctaaagctgcagatagttacctaaaggggttttatggatatttctaacatttctagacttattctggtcttcaggtgagaagaagaagttttaatttttccctgtggcaattgcaaagcctctgccctcaacctaatagttagttgcatttcattaagttagtaccatgctaaatacaaatacatgcgaaatacaaaaccygtgaaattaaccatttatctgtgcctctgctaatagttacttgcatttcattaagaagaaaaaaatgcaaagaggaataatactgtcataattctaaaactcctgatacaggaacaactatataaatttgtgattgttgaggataggaaattattaaagtaacagtgatggaagaagcagaagaacccttgtatctcttttgcctcagactgtaaaataaaatggagtcgaaggaaagaatggctagctggcgctgtgtgtgagtagggtgagtgactgcaggtgtgtgcagggtttctgatctgtatgtaaagagtatcaactggggttataaatatatgagtagtacaagataaactgaaaaggaaatttaattttgtggtgctccttgtcattatacatgtatttctcaatattccatattccacagatgagtattatctgttttcgtcccatttctttgtttctcctcttcttgttagaaatttctcaaattgtggtttcagggctctaacagtttaragtaggtgtgcttctctaatgattctaggaggactaactgtatttagagaaaatggtttttggttgrttctaagtctgagaaaactgaagaagtgaaatttcctccaactttgctgtcgtgtgcaatgtggcactcaaatgtcttgagcagagccatgcagctcattgttggctgcatgcagctggggctggctgtatgactggcctccmgtgatatgactcaggctgggcctgcgagtatgctagtgaaactgggtcatttgcttcagctaaatagaagactaccctgaaatgcctaacctttggagacagttcttcacatagaaaaaccacaagaagtataagttttacaggttctcttatttgaagagtcaacccagaagtgagaccaggtgctctaaacctgtgamatacaaaacctgtgaaattaaccatttrtctgtatctctgcttcccggctccttttctcccacaccacgggcccttatttcagtgactgaattataacaccatctaagtgacttgcaaaaaaaaaaattacaggaktgtgtgtgtgtgtgtgtgtgtgtgtgtgtgtatttgtgtataattagttttgttttctctagagtatgttatgattaatactataggtatgtaagaaatgtaaaaccgtattatttttaatccatcctctaggcactagtttaagattgcttacgatacagcctttttctaatgtgtcttaattagcatatcatactctttgaattgcataattaatataacacgtttaactggaagatatttaaactagtraccatttaaggtattttatcctagttaagcagccatcgagaagttttgtcacaaagcartaagagatagaaaaaattatttactacagaactatttaattttttatgtttttgcgatagggtcttgctctgtcacccaggctggatggcagtagtgcagttagggctcactgcagcctcagcctcctgggctcaagcaatcctcccacctcaaccgccagaatagctgggaaggcacctgccatcaagcctagctaatttttaaatttttgtagatgaggtcttgctatgttgcccaggctggtcttgaactcctgggctcaagtgatcctcccacctcaacttcccaaagtgttgggattacaggtacgaggcaccgtgcctggcccagaactatttttttcagatcagaatcttcaagttgagtgtgtttaacaatgtgcaatacttgcattttatgtttgagatttggttttatatgcattgccatgtgtataaaaagggaaatgttatcctttaatgacattttttccagtactacttaagtgaatttgtcatatcactaaaacctttgtttcaacaccaaaaccaagacatttgcatgaaactcttctaaaaaatgcatgtactcatattgtatattaattatatactaaatatagtatatgctcttttaagatawtgctctaataagctatcatataatggtaatagtgattactctttaacaaaagtaatgtcattttgtaaaaaaaaatcttttttttggtaatctcgtaagaaaaaagtttgaaaaaagttcttttgttatttttcacttatttgcttttgtcagtgaatgattcagtttcttaaatttcctgctgattttaatttgttgccttttggttaggtgtgttggcttacgtctgtaatcccagcattttgggaggctgaggtggggggatcacctgaggtcaggagttcgagaccagcctggccaacatggcaaaaccacctctctactaaaaatacaaaaattagccaggtgtggtcacacatgcctgtagtcccagctactcaggaggctgaggcaggagaattgcttgaacctgggaggtgaaggttgcagtgagctgagattgtgccaccacattccagcctgggcaacagagcgagactccatctcaaaaaaaaaaaattggttgcttttagttttgttttggatctgtattataaaacagtttgttatgattgtatcttatatctcttctatttctgacagcactcaattctgagtgaggcctgagagcttgacatctaaacattcagagttttagtgcatagactttgtgatgattatttggatactcagggacctttattgcttaytattttgttatctgctrtatgtataattgtcatatttaacaaaatctggcacctttagataaatgagatgttacataatttaaaaaggyaatacttttctaattccttatttccactttctctttatttttagagtatgccaagatggaaggaagcctcatacagtgagattaataatccgtcggtattcctctgagaagcactatggtcgtgaragtcgtcagtgccctattccttcacatgtaattcagaaattagggacaggtatggactagttttccaacagtttcattagcaggttgaactcttaaataagccaactttgaatgagaaatatgctccaaaaatggagggtcttcacagggaattagcaagcaattaaatgcttttattctatcaggaattttcactggaaaactttgttgtttgtttatttatttatttattttttgagacagggtcttgctctgcaccaaggctgaagtgcagtggtgctgtgatagctcactgcagcctttgtctcccaggctcaaacaattcttctgccccagcytcccgagtagctgggacagtaggtgcatgctaccagacctggctaacttttttgatatttaggatagacagggtctcaaactcctgagctcaagcaatccttctgcctcagcctccgaaagtgctgggattatgggcatgagctactgcacctggccttgtttttaaatagataattaagtaaagagtcatttaagaatgttttccaagttcaaagagaacaaaactgtgataactgtatagcatgagataacttctttatgggcatttagattgtttccattttgaagaacatttaaatgcaagtcattggatgggcatatgcatatgttttcatttatcttgggtagatttcaaagagtggaattgctggatcatatggtaacatgaactgtttaagaagctgccaacttttttccaaagtttgtgtattaatttacattttcatcaacaatatttgaaggttccagtttttcatattttcgccaatatttgtattatcagtctctttgattatagttgttctagcggtatatagtagtgtggtttttcttttatggatagtgtttttggtgttatatgtaaaaattctttgcctaactcaaaggtcacagatatttttttctgttttctgttagaagttttatagtttttaagctttatgtttaggtccattttgagttaatttttttatgtgtggtatacrgtaagggtcttcattctttgctttgcatgtgggtatccagttgttcctgcatcatttgttgaagactattctccacccactgaattaccatgacatctttgtcaaaaattaattgaccataaatataagagtttatttcctgactttcttgtttcattggtctatatgtttatccttaacactgattccaccctgtggtggtctctgctgctctgtttatttttctgtagtctttttttttttccgttttttcttacaaagtggataatttgtattgagctgcctgtaagttctctgattcatctgtcatctcataaccgctgttgcccctgtagtgatttgttggttttggttactgtactttttaactctagaatttctgtttgtcttttgtttatatgtttggttttgtttctttatcaagattctcctttttttgtagtcattatattttactttaattctttaaacatggttgtctttaattctttggacatatctataataatgaatttgragtctttgctaagtycacctcaaagtcaatttatgttaactgcttttccycccaaatatgtatcacactttcctgtttctttgcatgttttgaactattttattgaaaactgaacctcatagataatgtattgtagcaactctggatttacaattttttcttgtagggttttttcttttttgtttcctgtacttytttttaggtaacttgtctgaacgtaatctgcagaatttacctcccctgtgctgtgtagccactgatttctctgctcaagtgtttttttttttttttyccattcaaatttttattttaatactggcttctgggaagttgcccatgtctgtatagtttcatggttagccagtgattggcaaaggttttgctcaaacactagagtctggaagccgtctacctctgccagtggrtaagtgtatgggttggagagggcttaaaaaatttaggccattttcccatactgcccaaagtaatttataggttcaatgccatccccatcaagctaccactaactttcttcacagaattggaaaaaaatactttaaattgcatatggaaccaaaaatgagcccctatagccaagacaatcctaaataaaaagaacaaagctggaggcatcatgctacctgacttcaaactatactacaaggctacagtaaccaaaacagcatggtactggcagaaaaacagagatacagaacaatggaacagaacagaggcctcagaaataacaccacacatctacaaccatctgatctttgacagacctgacagaaacaagcaatggggaaaggattccctatataataaatggtgctaggaaaactggctagccatatgtagaaagttgaaactggatcccttccttacaccttatacaaaagttaactcaagatggattaaagacttaaatgttagamctgaaatcataaaaaccctagaagaaaacctaggcaatagcatttagtacataagcatgggcaaagacctcatgactaaaacaccaaaagcaatggcaacaaaagccaaaattgacagatgggacctaattaaactaaagagcttctgcacagcaaaagaaactattagcagagtgaacaggcaacctacagaatgggagaaaatttttgcaatctacccatctgacaaagggctaatatccagaatctacaaagaagttaaacaaatttacaagaaaaaagcaaacaaccccatcaaaaagtgggcaaaggatatgaacagacacttttcaaaagaagacatttatgctgccaacagacatatgaaaaaatgctcatcattgctggtcattagagaaatacaaatcaaaaccacaatgagataccagctcatgccagttagaatggcgatcattaaaaagtcaggaaacaacagatgctggagaggatgtggagaaataggaacacttttacactgttggtgggagtgtaaattagttcaaccattgtggatgacagtgtggtgattcctcaaggatctagaactagaaataccatttgacccagtgatcccattactgggtatatacccaaaagattataaatcatgctactataaagacacatgcacgcgtatgtttattgtggcactattcacaatagcaaagacttggaaccaacccaaatgtccatcagtaatagactggataaagaaaacgtgtcacatatacatcatggaatactatgcagccataaaaaaggatgagttcatgtcctttgcaaggacatggatgaagctggaaaccatcattctcagcaaactatcaccaggatagaaaaccacacaccacatgttctcactcataagtgggagttgaacaacgaggacacatggacacagggaggagaacatcacacaccggggcctatctggatggagggctgagggagggatagcattaggagaaatacctaatgtaaatgaagagttgataggtgtagcaaactaacacggtacatgtatacctatgtaacaaatctgcacattgtgcacatgaaccccagaacttaaagtataaaagaaaaaaaattaggccattttcaagtttttcttgaattttaatttctgctaggccctctttatctccccatgatgtgcatgtagccctttcagtaaggagtgtatggggagcttgggccctctgtggccttccatttatttgcatgtagcctcctagtcaactagggttgtamggggagcctatgtagtccctctttggttctctcatttccaaatctcctggtgacatatctggctggwccactgatctgtccttcacccgaaccacgactgaagcttcagactagcagagctgtgggatcttcccattcgtttcctatcaaatttgctcattttactggcaacactgctgagtgtgggcttttgcccrctgcctcaaatcaggtctgtcccctctggaagtgaaactgctggcttttgcagccttcaccctgtaccaactgagctatgtraagggacattcgaacagtcccagacagtgaagctgctatctcctactttcttagctaacatatagcagctgttcatagatcagtacttctcactttgtttgcctttggttcatttccagatttccaccaaaatgattgtttttgacaatgttgttcagttttatagtagctttttgagagaggattttctgaccatatcagtgtagtataaccagaaatcccatatttcaaatcttttgaaaatttttaaccatttagtattaatattgaaatgtcttaatttggtatataatgtcaagatgcccagtgatatttaggattttaatttcttaatctcagcaatataaaatatattatgctcttaatrttaattataatgtttattcttaaacattttatttaggaaattatgatgtgatgaccccaatggttgatatacttatgaaactttttcgaaatatggtgaatgtgaagatgccatttcaccttacccttctaagtgtgtgcttctgcaaccttaaagcactaaatactgctaagaaagggcttattgattattatttaatgccatcattatcaactacttcacgctctggcaagcacagttttgtaagtacactcttttttgttcagttttctaagtatactctyatgggatttgtgtggttacattacaaatctaagtgcttgtctttttgatayagtttagagattcttttgggtgatattgtttaggtgattaacttgtttataatacctatcttatggtttctggccttaaatatgctgtgatctaagaagaaaacataagcatcactggataaaagagagaaccattatggaggttctctattttggaattgttaacacattttrtagtatataaaaatatgatggattagctcataagtattaaaatatttgcagatattagaaatcacatctttttgtcttttagctgacacatgagctactagtacctttcccatgattcttttgttaaagtatttacattttcttcattttgaaatagtattgaattttgatagcartattgatagatttgactactgatttcatagttgtaaagttaacagtgtggcaatagaaaggcagaggccagtcacattttcagacgactaaaacaaaacccttttattaatagacaaaccactatttagtaaatgtgggttgccttaaaaacaattattttttactaaattgttcatgcctataattaactcaatttaaaatacttttktgtttgtttagtcagtataattttagtaaccttttcattttcatttaagtttaaagtgagaacaggatagtgtatggaaatagtgaattaatgctctcttcaaattacttttttctgtgacccttcttattccatttattaaatttaaaaaagtgttttctttttacattttaattaatctgtgaaattggaattaaaagtgctcatttatagtggcattagaaaagtaaatataagtgaaagtaccttgtatgtatttgtcacacagtaggtagtcaataaatataagggcctgaatcttttctactacttttacttttttggagttcatattgtgttgatgtttacggagttatatttgactatgtttatatttttatggtgcttgaaactaaaggatttaaatgaaaaactrtatagaaaaattatgcaagttagagttgaaagtgtctttaaatttttattttatataaatataaactagtactatatcttgatgatgttgggttttgttataggctttttttttctttttgttaaaagttaccctttagaatagtaatttttggaaaactagcccttgatgctatatgtgtatgtttttttgaaaaatacccttaggtgaacttgcttttctaggccgccattcttttatttatagaattgaaagtttggttgcatgattgttayaatcttcccaggtctccaaatgcatatttacctctgtctcagtgctatctaggaaggaaacctcttcctggaatagtgggtagagattcacaaaatagtgtgaataattgtggtagtagatctctagttgtttggaactggccacaaagagttgtatttgttgagtaggttagaaacatgtcagataatagctacaggcacacagcagcagcagcgatatttaaaagatatcagatatstaaattagtctgttattcttgtgttctagaaaatgaaagacactcatatggaagattttcccaaagacaaagaaacaaaccgggatttcctaccaagtggaagaattgaaagtacaagaactagggagtctccactagataccacaaatttttctaaagaaaaagacattaatgaattcccactctgttcacttcctgaaggtgttgaccaagaagtctycaagcagcttccagtagatattcaagaagaaatcctttctggaaaatctagggaaaaatttcaagggaaaggaagtgtgagttgtccattacatgcctctagaggagtattatctttcttttctaaaaaacaaatgcaagatattcccataaatcctagagatcatttatccagtagcaaacaggtatcctctgtatctccttgtgaaccgggaacatcaggctttaatagcagtagttcttcttacatgtctagccaaaaggattattcatattatttagataatagattaaaagatgaacgaataagtcaaggacctaaagaacctcaaggattccactttacaaattcaaaccctgctgtgtctgcttttcattcatttccaaacttgcagagtgagcaacttttctccagaaaccacactacagatagccataagcaaacagtagcaacagactctcatgaaggacttacagaaaatagagagccagattctgttgatgagaaaattactttcccttctgacattgatcctcaagttttctatgaactaccagaagcagtacaaaaggaactgctggcagagtggaagagarcaggatcagatttccacattggacataaataagcatattcagcaaaaaggtctgaaaagcaagggaataccattattttcggattagcggtttattaagctcttctatattaaacactaatagatattcaataacggagtaaactgttccagataaagcaagaatagttgcaagaagtaaattctggcacaaagcgtaaaaatataacagaagaaataatgtaaaatactatcttttatgtctaaagccattttatattacttttcaataaaaagaatatcatggtcaacatagaatatttttcatgaattggtggggagatgtatatgtttatatataaaaaatagccaaatcgttgcaatgatatggtaaaggacacattttttttttttttttcctgtgaaatgtggaatatctcaaattcagcctcttaggctgaatagcaaatcctactgccaactaacctattaaaaatatagatagttttgactaaagtactacattacatttagtatgttgacttttaaaataccaaagcaatttatattcaattaatgcttcttcatacaccaagaatctaccacaatacacagcacacaaaggccgttcaataaacattgaatgaatgaatggtttggctagggccagggtggggagttaaagtgagaggagggtatatgttatagagaacagtsgtagaaggaactctccgtgcaagtaaattaagggaaagatggacaccagaaaggcaaggtgatgggcctataagcatactggataatggaagaagtccatttctttctagctagtttgaagggcctaaaagcactgagatgtttttgtatcttccctacatttggagatgatattaggttgtcataacaaccacaaatatagaccattactaaattggtggatgtcctctttctcccattgttattgccttcctcttttgcctgctaaactaaaaattggatataagattgagaatgtattatataatttgcaagacatagaggatgtttatagaatatactaaagtatccctcagcaccaatatgggagtatcctggtctcaagtttataatttttgcacatataatctaaagaagagactttaaaaataaagtacacaaatatgaaccaaagagtagcttaaaaatactttcttctaggtctgaaattttcttttctttctttttttgttttggagacagagtctcactctgtcgcccagggtggagtacagtggcgcaatcccagctcactacaacctccgcctcccaggttcaagcaattctcctgcctcagcctcctgagtagctgggattacacgcatgccctaccacacccagcaaatttttgtatttttagtagagatgacatttcaccatattggccaggctggtctcgaactcctggtctcaggtgatcctccaccttggcctcccaaagtgctgggattacaggtgtgagccattgctcctggccccagctctgaaattttaacttagttttggattccttggaatttgaaaatatgctaacacgaaggattgtaaataggtagtttgaggttatcaggaacagtaacttgaagcaagaacatcagaaattgttcaccatgcaaatatttagtactctgaatcaaggaacatagtattttttacatgagtattccagtaaggtaattaaacttatgaaaagggtatataactttttgtaaatcattaaaacattttatagtccttgtaatgatttcaggaccttggacagctagaaggggcttaagaaaaaatggctaagaaaacaaagtaaatggttttggccagcttaaaaagagaaagcaaaatagttaaaaatacatttcatagattgagaatgtacgggctatgtcacagttaygctacttattttgtggttttaagttagtctcaacatctttgggcctcagaatcaacttttttatgggatcttttttctctgtttttaagattatctcttttttctttggtgctttgcaggtttactgtattatttggaagtgcgaatttatttttattcttagtatatactggcttcttcctgtatcttttaattcatgttctgtaaaattctcaaccactagctcttcaaatatttcttctctattctaggactgtatacaaatgatagactttcttactgtatccttcatgtctcttaatttctcatatttttcatcctcttgtttctctttactgcattttgggtaatttcatcagctctatctttctgtttactagttcatttttcagtagcatctcacctgctatttaaaacaatgatggttttaatttcaataaatatatttttcatttgattctttttaacttcccgtttactcattacagtcccttgtaagtctrtttctaatttttaaaagtcaaatatatgatatttttgataatttcaatattttaagtctttataagtctacatttaaggttattattgcatatcattgtgacttatttccttgagtatgtgttaatctgcgagaagacagagggcctaaattgtgtatgttttccttcagtatgatttgagttcgttgcttctctgggtgaggtggtacaaactccttggcatactctattcacctttgtggatcctgattgaatgccttgtcttaagtgtaagctccctgacccttactactagccgaaggttttgtctctgcaggtcaattccaaactaacaggcagatgctgttagctatctgcctccagggataaaccccatctttcaagcttgcttcttgcttgatgctttctgctgctttcttgcttttgtttcagctcgagtttgttgttgttttttttttttcctgtttctgtcttgaatgtagagggtatttttatttttattttttctgtttctctcttgagtgtatagtgtagagggggtttctgtcttgagtgtaggcctggagatttcccttatatggtacaaaccagcaatgaattaagaggtctcttttctccaagatctagtgttttgtactaggagaactctaaaaagtatctattccactgtagtgccaaagtacaaatttattkggatttattttttgccatcttattttttaatatatttctttttctatgttgtgcttctttcccacctttatctctcctcctatcttkkgggatcagttgggttttctatttaatcatatattttccctttactgatttggaatgtgaatgttacaagtccttttgattatccttaaacatctaaaaatgctaccctctttccaaacaacacaaaggtattgaaataacattaattctaattaaatyccacaagttctttattaaatctccaaattggatattattagtattttatatagtcaatgtttatttttttgatgggacatggtgggggcttaccttttttcttgtgtgtcagatgttccttctaggtagaattctttataccttctgaaattatgtccttagagctgtagatttagaactgacatctcttgagctgttctaagataatatcttttactttggagatacgcagtttttattatatgtctagctatagatttatcatggatttaggttcattatgaatctgcagatttgtgtcttccatcaaatctggattgttttcaatattaaaaaaacttctattttaaaatctgtatatagaaaggtacataaacataaatgaacatgttaatgagtaattgtaacaactatgtaactgtccaagtcaagaaataaaacatatcaagtaatcaagaagtccagagttttctttggggtttcattacgtaggcatgatttattaaaacctttactgtgtgmttgaacttaatctccagtttccctcctctgtctggacatcaggctggctcaaagtctcaacaccctaatcatggttgtttttttgaagtgagctacctccatcctaaatcatctttttagcattagctgtctagggcccactgtgggtcacatcattagcatacagtgtcagggcttaccatgaataatgaaggcacttctgttgtttaggaaattccatgggttttaggagcttggtgtccaggaaccctgaacgaagaccagaccaattatactacagaatcttttttttttttttttttttgagatggggtctcgctctgtcgcccaggttggagtgcaaaggtgtgatcttgactcactgcaacctccatctcctgggttcaagtgattctcctgcctcagcctcgagtagctgggattacaggcacctaccaccacacccagctaatttttgtatttttagtagagatggcatttcaccatgttggtcaggctgatcttgaactcctgacctcgtgatctgcccgcctcagcctcccaaagtgctgagatacaggtgtgagtcaccacccctggccctactacagaatcttttaaaataagttttgagatgtattatggccccaaagtgatctactttagtaaatataggtatgacttgactgacaatgtggttatgctcagataagcccattgtaaattgaaaatatcatgagtgaaatacatttaatacatctatgaaacatcatagcttagccaggcctacctcagacatactcagagcaactcacgttggcctacagttgggcaaagtmgtgtaacacaaagcctgttgacagagcctgggccgggcgtggtggctcatgcttgtaatcctarcactttgggaggccgaggctggtggattgcctaagctcaggagttcgagaccaacctgggcaacatggtgaaaccctgtctctaccaaaatacaaaaagttgactgggcgtggtggtgcacgcctgtagtcccacctactggggaggctgagacaggagactcgcttgaacctgggaggtggaggttgcagtgaaccaagatcccaccattgcactccagcctgagtgacagagcaagactccatctcaaaacaaaacaaaaaaagcctgttttataataaaatgttgaatatctcatgtaagtatcatactgcatatcagtcaccgaatggaattaacagcagatactgctggagaaaaaattagtgcactagaagtcagagcaataaattattcagaaagaaacagagaaaaaataataaacacagmatctgtgagctatgagacaacttcaggcaggctaatacatgtcttattcaagtccccaaagaagagaagagggtgggagatgtaaaaaatatgtgaagaaacaatggagaaatttttccaaatttgaggttaactataaacccacaggtccaaagagcttggcaaatcccaggtacaataaacgtgaagaaaactataccaaggagtaacctaatcagagctcttaaaaccagtgataaacaccatcccttsaaaaagacatactattgcagaaaaacaagcaaagccaacaattttgaaaatattggaagccagaagacagtggtctgacatcctcaaataaagtaaagaagtgggggaaaagttggttaacttagatatcttaaaaaaaaaaggaaaataagaacataaggcatacatatgaaagaactcatgcccggtagacctacattacccataaaattagaggaagtccaacaggcaggaagagcacaccagatggaaatacagatctacacacagaaatgaggagcaccagaaatrtgagtatatttaaaagctttttttgtttcttatttctaagtgtctttttaaaagttggctatataaaacaaaaataaaaattattaaaaatatattgtaggattacaatatatgtgggagtaaaatgtaacagtacaaaggccaggaggggaagtatataattttaagtatagaaatggtagtatattattgtaaggcccttaaactaaacatgaagtggtgggttacatcttgaagacagactgtgataagttagagatgtataatataaaccctaaaataaccactgaaatagcaaaataagttttaattaataagccagtaaagaagataagaaatagaataataaaaagccacaaaattcaatccccaaaaaaagcttaaaaggagagaaaagaggaataggacacatggggaaaatagaaaacaaatagtaggttggtacatttaagtcatatcaaaatcatgttaaatataaatgatctaaaaacctcaattaaagggcagagattatcagattgcatgaaaaagtaggacccaactgtctgctgtgtatataaaattttttaaaaaataaagacaaatatgttaaaagtaaaaattggataaaagacacgagtctaacattaatcaaaagaaagatgtartagctttcaacaggaaaactgcttgttagagcaaaggaatttaatcagaaaatcatttcaaaatgataaacgagtcagttcatcaggagaatgcaatagtcctaaatgttaatgcatcctcaaaatacataaagcaaaagctgataaaactgcaaggggaaaaatatccacaattgtagttaagagatttgaggctgggtgtggtggctcacacctgtaatcccaacactttgggaggccagggtgggcagatcacaaggtcaggagttcgagaccagcctggccaatatactgaaaccccgtctctactaaaaataccaaaaagtagctgggcgtggtggcgggcacctgtaatcttagctactcgggaggctgacgcaggagaatcacttgaacctgggagatggaggttgcagtgagctgagattgtgccattgcactccagcccaggcaacagtgtgaaactcccatcacacacacacacacacaaagatttgaatacttttttctcaataattgctaaaatgaacatacaaaaaaaaatcagtaaggatacagaagacctgaacaattgacatttatacaaaagtccacacaacagcaaaacattttgttaaagtgcacacagaatacagatgttccctgacttacaatagttcaacttaaaaattttcaacttcataatggtgcaaaaacaatgtacattcaggagaaaccatacattggattttacattgtgatgctccttctgcttctttcaggtgctttctttctcagagttcatatgcatataataatcaatactcaactgaggacttaaggggtattttctgcagatttctgcagctatctgaattctgaactctagctgttcgtgcctccagactcccaggtccttaattcacagagactgctgggctctctctggcttctctcctccagggctgcaccctggaaacttcaggcagtaagctaaggcaattgtagggctcacctcatttgctgacttttcatttctgctattttgtttttattttacttttttaaaaagttcttccttattctctaaatgtttatttccatagcaccctgttcttgttcattttttctcagatacagtatcttctcatctctaaagatgtggtaaaacttccaaagatttccttatactgtatagtctctcttgaagttgcttttatttgtttaagaatgtgggactaaaaatatgactggaagctctgatagcttgggtaggacttgtcagctttgagttacatacaggatgatctggctaggccattgttgggggaactcctgatgtccgtatcattagatctttcctttggggctggttatgtttatcaaatatgatgattaaaatatcttacttagattatgaatgtctgtctgtctggctggctgtgttataggaacaatgtggggaaagggactagaaatctcagcattcaatatgtatactcatttaatcttcctgttcttagtatacttcctagattctcaactaaaccaaacattctctagttcagagaccatttgttttactgtcctctagaggagagtaaaaaaagagttttactcttttacaattctctagaaaaaaactccaaccttttgttggatttgaggagataatttctcaatgtttttagtctttaatttttgttggtacatagtaggtatgtatatttataggggtacatgagattctttgatacaggcatgcaatgcataataatcacatcatggtaaatggggtatccatcccctcaagcatttatcttttgtgtttacaaacaatcaacttataatcttttagtcatttaaaaatatacaattaaattattattaactataatcaccctgttgtgctatcaaatactaggtcttattcattctaattattttttgtacccattaactatccccacttctcccaacccacctccactacccttcccagcctctggtaaccatccttctactctatcttcacaagttcaattgttttaatttttagctcccacaaataagtgagaacatggaaagtttgtctttctgtgcctggctaatttcacttaacataacaacctccagttccatccatgttgttgcaaatgtttctcaattagttttcacccacttctccttaccaagtcccattagcatcacatcattgatgtggaattagccctgtgggttatcagcttgtggatgtccagtatttgtgaaagcaaaagtaatgatgtattgctatttgaattacagctgtgatatatagtcttgcatttaatggttccaatgtagacttaaaggtagaagctctcatggtaggacacctacatagtatacttggaggcatccccaagagcctagaatctgcccttcccacttttccaacaatgccctaagtacctaattagctgtaataaattyacccctttctgcctaaactacctagattgttctgcattattcctagaatgacagaatgrtagaaaactcaattcttttaaaaatcygcttgcactttttcttacacygtctgtgttaaaactgtcatgttttattttaattactattttcaacaaagtcatttttattctatatgaggtaatacaaatatttgaattatttggtgggggactataattctttgtcttatttattatttctrctgactactcacatgctggcatttttcctcatgtgctctgtgattttggagtgtgtgttcatgtttgctagcctttatttgtggaactcctgcaaggtctggatgaggatgtgtcactccaggaaatatttgcacttgcttctgctggcacttggactattttgttaatttcttatcttgcaaattaaacctcaaatcttggcagactgcaggcatgcattctcagatgatacttccacctctctcccagttcatttttcttttttttttttttaattatactttaagttctagggtacatgtgcacaacatgcaggtttgttacatgtgtatacatgtgctgtgttgctttgctgcacccattaactagtcatttacattaggtatttctcctaatgctatccctcccccatccccccacccyacaatggccctggtgtgtgatgttccctgccctgtgtccaagtgttctcattgttcagttcmcacctatgagtgacaacatgtggtgtttggttttctgtccttgcgacagtttgctgagaatgatggtttccagcttcatccacgtccctacaaaggacatgaactcatcctttttatggctgcatagtattccatggtatatatgtgacacattttcttaatccagtctatcattgatggacatttgggttggttccaagtttttgctatagtgagtagtgacacaataaacatacatgtgcgtgtgtctttatagtagcatgatgtataatcctttggatatatacccagtaatgggattgctgggtcaaatggtatttctagttctagatccttgaggaatcaccacactgtcatccacaatggttgaactaatttacactcccaccaacagtgtaaaagcgttcctatttctccacatcctctccagcatctgttgtttcctgactttttaatgatcgcyattctaactggcgtgagatggtatctcattgtggttttgatttgcatttctctgatgaccagtgatgatgagcattttttcatatgtctgttgactgcataaatgtcttcttttgaaaagtgtctgttcatatcctttgcccactttttgatggggttgtttgcttttttcttgtaaatttgtttaacttctttgtagattctggatattagccctttgwcagatgggtagattgcaaaaattttctcccattctgtaggttgcctgttcactctgctgatagtttcttttgctgtgcagaagctctttagtttaattagatcccatttgtcaattttggcttttgttgccattgcttttggtgttttagacatgaagtccttgcccatgcctatgtcctgaatgatattgcctaggttttcttctagggtttttacggttttaggtctaacatttaagtctttaatccatcttgaattaatttttgtataaggtgtaaggaagggatccagtttcagctttctacatatggctagccagttttctcagcaccattcattaaatagggaatcctttccccatttcttgtttttgtcagatttgtcaaagatcagatggttgtagatgtgtggtgttatttctgaggcctctgttctgttccattgttctgtatctctgtttttctgccagtaccatgctgttttggttactgtagccttgtagtgtagtttgaagtcaggtagcatgatgcctccagctttgttctttttgcttaggattgtcttggctgtgtgggctcttttttggttccatatgaactttaaagtgtttttttccaattctgtgaagaaagtcattggtagcttgatggggatggcattgaatctataaattacctttggcagtatggccattttcacgatattgattcttcctatccatgagcatggaatgttcttccatttgtttgtgtcctgttttatttcattgagcagtggtttgtagttcttgaagaggtccttcacatcccttgtaagttggattcctaggtattttattctctttgtagcaattgtgaatgggagttcactcatgatttgactctctgtttgtctgttattggtgtatatgaatgcttgtgatttttgcacattgattttgtgtcctgagactttgctgaagttgcttatcagcttaaggaggttttgggctgagacgatggggttttctaaatatacaatcatgtcatctgcaaacagggacaatttgacttcctcttttcctaattgaataccctgtatttctttttttttttaatttcttttttgaaacagagtctcgctctgtcacccaggctggagtgcagtggtgctatctctgctcactgcaaactctgcctcctgggttcacgccattctcctgcctcagcctcctgagtagctgggactacaggtgcctgccactacgcctggctaattttttgtatttttagtagatacggggtttcactgtgttactcaggatggtttcgatctcctgacctcatgatccgcccgcctcagcctcccaaagtgctgggattacaggygtgagccaccgcacccagccccctttatttctttctcttgcctgattgccctggccagaacttccaacactatgttgaataggagtggtgagagagggcatccctgtcttgtgccagttttcaaagggaatgcttccagtttttgcccattcagtatgatattggctgtgggtctgtgctaaatagctcttattattttgagatacgtgccatcaatatctagtttattgagagttttttgcataaagggctgttgaattttgtcgaaggccttttctgcatctattgagataatcatgtggtttttgtcattggttctgtttatgtgatggattatgtttattgatttacgtatgttgagccagccttgtatcccagggatgaagcccacttgatcgtggtggataagtttttgatgtgctgctggattcggtttgccagtattttattgaggatttttgcatcaatgttcatcagggatattggtctaaaattctcttttttgtgtgtgtctctgctagcctttggtatcaggatgatgctggccccctaaaatgagttagggaggattctctctttttctgttatttggaatagtttctgaaggaatggtaccagctcctctttgtacctctggtagaattcggctgtgaattcatctgttcctggactttttttggttggtaggctattaattgttgcctcaatttcagagcctgttattggtctattcagcaattcaacttcttcctgatttagtcttgggaggatgtatgtgtccaggaatttatccatttcttctagattttctagtttatttgtgtagaggtgtttatagtattctctgatggtagtttgtatttctatgggatcggtagtgatatcccctttatcattttttattgcatctatttgattcttctctcttttcatctttattagtcttgctagcagtctagctagcaagaaaagatcaacaaaattgatcttctcaaaaaaccagctcctggattcattgattttttgaagggttttttgtgtctctatctccttcagttctgctctcatcttagttatttcttgccttctgctagcttttgaatttgtttgctcttgcttctctagttcttttaattgtgatgttagggtgtcaattttagatctttcctgctttctcttgtgggcatttagtgatataaatttccctctatagacacactgctttaaatatgtcccagagattctggtacattgtgtctttgtttcaaagaacatctttatttctgacttcatttcgctatgtacctagtagtcattcaggagcaggttgttcagtttcctggtagttgtgcggttttgagtgagtttcttaatcctgagttctaatttgattgcactgtggtctgagagacagtttgttgtgacttctgttcttttacgtttgctgaggagtgctttacctccaactatgtggtcagttttggaataagtgcgatgtggtgctgagaagaatgtatattctgttgatttggggtggagagttctgtagatgtttattaggtctgcttggtgcagagttgagttcaagtcctggatatccttgttaaccttctgtctcgttgatctgtctaatattgacagtggggtgttaaagtctcccattattattgtgtgggagtctaagtctctttgtagatcactaaggacttgctttatgaatctgggtgctcctgtattgggtgcatatatatttaggatagttagctcttcttgttgaattgatccctttaccattatataatggccttgtctcttttgatttttgttggtttaaagtctgttttatcagagactaggatttcaacccctgtttttttttttgcttaccatttacttggtagattttcctccatccctttattttgagcttatgtgtgtctctgcacgtgagatgggtctcctcaatacagcacaccaatgggtcttgactctttatccaatttgccagtctatgtcttttaattggggcatttagccatttccatttaaggttaatattgttatgtgtgaatttgatcctgttattatgatgttagctggttattttgcccgttagttgatgcagtttcttcctagcctcgatggtctttacaatttggcatgtttttgcagtggctggtaccggttgttcctttccatgtttagtgcttccttcaggagctcttgtaaggcaggcctggtggtgacaacatctctcagcatttgcttgtctgtaaaggattttatttctccttcacttatgaagcttactttgactggatatgaaattgtgggttggaaattcttttctttaagaatgttgaatattggctcccactctcttctggcttgtacaatttctgccgagcgatccgctgttagtctgatgggcttccctttgtgggtaacccgagctttctctctggctgcccttaacattttttccttcatttaaactttggtgaatctgacaattatgtgtcttggggttgctcttctcgaggagtatctttgtggtgttctctgtatttcctgaatttgaatgttggtctgccttgctaggttgtagaagttctcctggataatatcctgaagagtgttttccagctgggtttcattctcctcgtcactttcaagtacaccaatcaaatgtagatttggtcttttcacatagtcccatatttcttgagggctttgtttattgcttttaactcttttttctctatacttttcttttcacttcatttctttcatttgatcttcaatcactgataccctttcttccagttgatcgaatcggctactgaagcttgtgcatgcatcacgtagttcttgtgccatggttttcagctccttcaggtaatttaaggtcttctctacactgtttattctagttagccattcgtctaatcttttttcaaggtttttagcttccttgcaatgggtttgaacatcctcctttagctcctagaaatttgttattaccaactttctgaagcctacttctgtcaactcgtcaaagtcattctccctccagctttgttccattgctggcgaggagctgtgatactttggaggagaaagggtgctctggattttaraattttcagcttttctgctctggtttctccccatctttgtggtttaatctacctttggtctttgataatcgtgacctacagatggggttttggtgtggatgtctttcttgttgatgttggtgctattcctttctgtttgttagttttccttctaacagtcagatccctcagctgcacgtctgttggagtttgctgggggtccactccagaccctgttttcctgggtatcaccagcggaggctgcagaaaagcaaatattgctgcctgatccttcctctggaagctttgtctcagaggggcacccggctgtatgaggtgtcagttggcccctactgggaggtgtctccaagttaggctacgtgggtgtcagggaagaggcagtcagtccactctcagagctcaaacaccrtgctgggagatgtcccatgtcttcagagctgtcagacagggatgtttaagtctgcagaagtttctgctgcctttagttcagctatgccctgccctcagagatggagtctacagaggcaggcaggcctcattgagctgcggtgggctccacccagtttgagcttccaggttactttgtttacgcagtcaagcctcagcaatggtggatgcccctcccccagcgaggcatgccaagccacctcgcagttccatctcggactgctgcactagcagtgagcaaggctccatgggcatgggacctgctgagccttgcctgggatataatctcctggtgcgccgtttgcyaagaccattggaaaactgcaatatttgagtgggagtgtcccgtttttccagatacagtctgtcagggcttcccttggctaggaaagggaaattccccggccccttgtgcttcccaggtgaggtgatgccccaccctgtttcggcttggcatccgtgggctgcacccactgtccaaccagtcccagtgagatgaaccaggtacctcagttggaaatgcggaaatcacccgtcttctgcatcagtcacactaggaactgcaaaccagagctgttcctattcagccatcttgtagcggacccctgttttcttttatttttatggttggattatttttttctagttcgctgttttactgagaagatagtccttcaaggttcctgagctgtcacattctagttactcaccttctgtgggtccaaagtcttatctcctatcttcaaacttagatttaatcattttttgttttcttatttgcagactaccaccacttgtaaataagttataaggatagtgtggaattctctcttatcctgttacctcacagtattacctactattttttttttttctgggagaaaggtatgctctgcatttcagccttgttttataaaattgattcatgttaacaattttagttcacaaagagwgttacacttttgatacatagtggtcaggttctcacaatttggtgatatttgggtgtccgccctttcttttctaagttgtatttattatatattagatatactaaagtcctcaaatattgaaaaaatcttttaaaaatatgttaaaagcttttgagaaaactataagctttttttcaaatgtattagtcaggaaaatggaactggtgtacatattttaagtaagaaggaatttagtgtagtgaattaaatgcttacaaaataattgagaagctgaaggagtgagttctaggtttggccgccagaaatgaatctgagaactatacagaatcaaccaccagataagctctttttattaaaaaaaagtagagatgggatctcgttatgttgcccaggctggtctcgaatgcctggcctcaagtgatcctcctgcctttgcttcctgaagtgctaggaaggattacaggcatgagccactgtgcccagtctagctatttcttttkgatctgttgtagaactatgaattgaagaaagtgaaatcagtatgctgccaccctgccacttcttcttgaaatctggaaagctggagaagttactgacaattgtaacccagtgataaggaaccaggaattgagaagctgctgttgcctctgttgttgatgcatctacctcttggcacacaagagtctggtagttggacactggaacacagaaaagaagactcacatatccttgtttttgctagccatcagaaatggcaataaaataataataataatgaagaaacatggcttctgcttcactaagaaagtactattgaattactattgaaattactaytgaattttaaaaagtggtcagtatagtatatttgtgtcatagtggtcattcctttttgtttcaaattaccaacttgtattctaataaagtttagccaatagttgatttatctaaaccaaacctatgtagatacatgtatactgagacagaacaatttgtgatgttgacagaagaatatttcatctatttaggcttagccagactatagtgttctacttcaattgtcatcaacttttttgatataacaccctagcagtgaaaaaaacttgggaggtacacactcacagaatctgtatatttactaaagatgcaccaaagtttaggtttagccttagtatgcacttccttggtgtttgggtggccgaataatcaaataactacatcagcatcaatttgtggcatcccatgaaattgtgcacaaaattatcatgttcctcacatagtttacatcatatctaatcaggattaatgattctagccataaaaatagggcatcacatttagatttattattaacatctgaatattcactttctttttttaacttttattttagaattgagggatacgtgtgcaggtttgttacagagatatattgcatgatgctgatatttggagtacaaatgaatccatcacccagatagtgagcatagtatccaatagatagtttttcaacccttgatcccctctctccttctcccttatattcccccccagcgtctgttgtttccatctttacatccatgcatayccaatgtttagctcccacttataagtgagaaaacgcagtatttgattttctgtttctgtgttttttgcttaggataatggtttccagtggcatccatgttgctgcaaaggacatgactttgttcttttttatggctgtgtagtattccatggtgtatatatgccatattatctttatcgagtatatcattgatgggcacctgggttgattcctaggtgttcatatgtctttgctcttgtgaatagcgctgcagtgaacatatgggtgcatgtgtctttttgctggaatcatttattttcctttgggtatatacccaggagtgggattcctgggttgaatgattgttcagttctttgaggaatctccaaactgctttccacagtggctgaactaatttacattctcaccaacagtgtgtaagtattcccttttctctgtagcctcaccagcacctgttatttttgactttttaacaaaagccattctgactggtgtgagttggtatttcattgtgattttggattgcatttctctgataattagtgataagcatttttttcatatgtttattagctgcttgtatgtcttcttttgagaagtgtctgtttatgtcctttgcccactttttaatggggttatttgttgtttgcttgttgatttaaattccttatagatcctggatattaggcctttgttggatgcatagtttggagatattttctcccattctgtagcttgtctgtttacacctttgatagtttctcttgctgtgcagaaactctttagtttaattaggtcccacttgtcaatttttgttttcattgtaattgcttttgaggacttagccataaactctttgccaatgccaatatcgagatgggtgtttcctagattttcttctaagaattttgtagtttgatggcttacatttaagtctaatccatcttgagttaattttgtgtatggtgataggtgggggtccagttgcattcttctgcatatggatagccagttatcccagcaccatgtattgaataggcagttctttctctattgcttacatttatcaactttgacaaagatcagatggttgtaggtatgtggctttatttctgagttcttttactctgctccattggtgtatatgtctgttttttaaccagtaactttctattttcgtttctgtaaccttataatacattatacttcgaagtcaagtaatatgatgtccccagctttgttctttttgcttaggattgctttggctatttgggcttttttttggttttgtatgaattttagaatagtttttctaattttgtgaaaaatgacattggtagtttgataggaatatcattgaatctgtaaattactctgggcactattaccattttaatgatattcattcatccaatcaatgagcatggaatgtgtttccatttatttgtgtcatctctgatttctttgaacagtgttttgtaattctcattgtagagatttttcacctccctgcttatgtgtattcctaggcatttagttctttttgtagctattgtgaatgggattgtgttcttgatttggctgtcagttttgatgttgttggtatgtaggaatactactgatttttgtacactgattttgtatcctgaaactttgctgaagttatcagatataggaactttttggcagagattatgggggtttctagatatataatcatattgtctgcaaacggggatagtttgacttcctctctggctgtttggataccctttattcctttctcttccttgattgctgtggccaggatttccagtactgttgattaggagtggtgagagagggcatccttgccttgttctgattttcaaagggaatgcgtccagcttttgcccattcagtataatgttggctgtgtatttgtcatagatggtttttattattttgacatatgttcctttgatgcctagtttgttgagggcttttatcatgaggggatgttgaattttgtcaaaagcctcttctggatccattgagatgatcatgtggcttttgtttttaattcttcctgggatgcaaagttggttcaacataataatttattcacatttattgatttgtatatgttgaaccaaccttgcatcccaggaagaaagcctatttgattgtggttaattaactttttgatgttctgctggattcagattgttagtattttgtttatggtttttgcatcaatgttcatcagcaatattggcctgaagttttctttttttgttgtgtctttgccagtttttggtatcaggaygatgtttgtttcataaaatgagttagtggggagtccctcctcctcagttttctttggaatagtttcagtaggattggtgccagctcttctttatatgtcttatagaattcagctgtgaatccatgtggtccagggcttttttaaaaaattattactgactcaattttggactcattagtggtcagttcagggtttcagtttcttcctggttcaatcttgagatgttgcatgcttccaggaatttattcatttcctctagattttctagtttgtgtgcatagaggtgktcgtaatggtcactgggkatcttctgtatttctgtgggatcagttgtaatgtcatctttgtttatttctgattgtgtttatttggatcttctttttttctttgttaatctgattagtggtctatcaatcttgtttattctttcaaagaaccaacttttgatttcattgatctttttgtrtggatttttgggtctcagtgttattctgttatgctctgattttggttatttatttttttatgctagctttgcagtcagtttgctcttgtttttctagttcctcttcatgtaaygttagattattaatttgagatctttctaacattgatgtaggcatctagtgctataaactttactcttatgacattgcttcagctgcgtccaaatattttggtatgctatgtctctattttattaatttcaaagatttttggatatctgccttactttcattgtttacctgaaagccattcaggagcaagttgtttaatttccatgtaattatatggttttgagagattttttggtattaatttctatttttattgcactgtggtctgagagtgtgcttggtgatttcaattttttttcaatttcttgagacttgctttatgtatggccaagtatgtggttgatcttagagtatgttttgtgtgtggatgagaagaatgtatattctgtggttgctgggtggaatattctatagatgtctattaggtccaattggtcaagtgtttgctttaagtccagaatttctttgttaatttctaccttaatgtactgtctaacactgtcagtggggtggtgaagtctctattactatgtggctaagtctttttgtaggtctagaagtagttgttttatgaatcggtgctccaatgttgggcgcatatatatttaggattgttaagtcttcttgttgaattgaaccctttgtcattatataatgcccttctttgttctttttgactgtttttgatttaaagtctgttttatctgatacaaaaataatgacccctattcttttttgttttccatttgcatgatggatctttctccacctctttactttgagcctctgtgtgtcattaatgtgagatgggtttcttgaagacagcagacagttgggtcttgattttttatccaacttgacattttatgcattttttttttttgagacagggtcttcctttgttgcctagactggaatgcagtgctgtgcttatagctcactgcaggcttgaactcctaggctcatgcaatcttcctgcctcagcctcctgagtagctgggactacaggcatgtaccaccatgcctggctaatttgctattttttgtagagacaggattgcactgtgttgcccagactggtttcaaagtcctgggctcaagtgatcttcctgccttggcttcccagaaagttgggattataggtgtgagccactgcaccagacatctatgccttttaagttggrcatttagactgttgacattcaaagttaatattggtatgggacattttgatcctgtcatcatgaatatgtactttcaamtatgggtaaacattctagatgttacctaataaaatctcataagcttttcttgtgatttcatcagagtctaaatttgtgattattattgcaaagaaaaatgttgatataattgaagattgtgaagcttattttatgtacaaaacaattattaacagcttacaaattattgagagagtggattagcttggtcattttatgatgtaacatattctttttgagtcmacagaataaaatgtgtggttatttgttttgtggtgttatttcagtaatagataatagctataaaagttggtacataaaagtggagggctatacaacaaaamcccaaatatgtggtatttaggcttttgggcagtagagggctcagaaaactgttagcagaggctggagtaacaatgaggaaactgctttaagaagttcttatgaaatatttggtaaaaggaaaaaaaagctgcttatagtacattggaaaacaaaatattgtaccttatgaacttttggcttagaatgtcttcaggcaaaatgtagaaagcaccaccttgtgcacttaactgcattagattaaagtactgtaaggaagttgattgagggttgctatttgcaagcggaagttaaaggtaatatataggagtctggaattactaaattggagagtagaactgtttcatctccagcttttggttatactatctgagatgtcctcctttttccatcattatcttttcaaaattctttctaagaaatgatcatttttggaaacttaytgattatgagtttagacatgtgattttgctaatggaatgttggactttagaaagtgcttacaatatttccacttcctcccttgctcccttgccttcttatgagaacatacaaaggctaggctgctagtggatgaaattcatgaggcagagctaagtcgccccagttacgtcagcccacctcatcctttctcagataacccacagccaattgccaggcatgtgagtgagctcagacttaagagataaagttagatttgtatgtcactgagattttgtgattgtctgttacacataattgtggcagttgatattcatacaagtgtgtacartaatatgcacaataaagcarcttcattattagaaaaaaatgaagtatattaagaaagtgttagcaaaaaagtgttagtgaaaaacaaactaattttgttctgacgaattgagtcccaaaataatctttaartggtggataaattttaaagcagaacgtattaaaattatttattgggctggatgcagtagcttatgtttgtaatcccagtgctttgggaggctgaagcaggagaattgcttgaggctaggagttgggagaccagcctaggcaatacagcaagaccctgtctttacaaaaattaaaaaaaattaacccagtgtggtggcatatgcctgtagtcccagctacttgggagggtgaggcaagaggatcccttaagcccaggaggtcaaagctgcagtgagctatgatcataccactgcactcaagcctgggcgacaggctttaataaacaaaaaggatttattataaattgctgtctttggtagttgaagattaagaattttttagattcgccaaagctattaatcctaaatcaaagttgattctgaaaatcatataacttaaaacctattctaagatttaatgtccaaaaaaattagtaatataattaygcataccacttgaacctgggtgttttataatattgaattcgtgcaatatagtatatgccttgaagctagctcacagttctgagaggttttttttgtactctaatgacaaattttaaaatgttgactatttttaaaaacaaagttgtaataaatatttttggataaaatttcagatttatctttatatygtagtttattctaagatagtagtaataataggagctgggtttagtttgaccaaatactgatttaaatactcagctctttgtccaaagtgtgcttttaattcaatgtacatctatttttacttattttaaaagtgtaaacatgaaccactgtcattggataacatctcaatatatgaaagatatttctggtgaagttcgttttcattgacattagatataatttcatatttcaaatagtcttgataatttctattttttgctagcttatgagatctaaactatattgtcgtttacttttaatattgcaaagatctcatattagtaaaatttcagctgygttcatgtttgtattattagtattttcaatccttaatttctttgtagaaatcttttaaaccaattcacaattttctgatgatttttttcattaaaagtatatctgcttaactgtacccctataaaacataatttgtcaaaatatactgaaagccaacaaccaatttcaaaccttccacactgtggaactcatccttatttctcagaatatcttttatgctcatgaatggctaggtgaggcaccagagtcaagctgcatattctgtattagtaaagcttaattttctaaaaaaataaatataaatataagttgtgctattttatttctgcactctggtggagcttctttgcttttttactatagatactggaatacctttccagatgcctttgcagccaggtgtgaacagtgttccatttctggctaatgagatgtaagcatctttcttggggttcccaagaaagctatgaaatagggctaaactcagctaaaatatcttttgcctttcactctttttcttcctgcttagaacawtgggacaatgccaccagaaagacaaatgctataagctaagtatggcagagctgagtgctgtaaagagccttggtccctaatgacattattaggccatcatatcagatctctactgcagactcccagacttcttgtgtgagatcaataaacctctcaacatttatgtcctctataaatcatatttttgttgtttgcagccaacgttttcttaactgatataataatgttgcactcccctctatggaaaccacagttctgattcattagtattatgtgtccaaaaccatggtagagaagggacattgaaaagggacatggggcatggggcataaatagtcttgataatttctcgataagactatgactatttatatttagttaaatataaacatttttgttttggtaagtccagtaatgtctgaatatctgaaagtattrgaggagttatatggtaagaaagataagatttatagaaaaatctaagttcagaattgttaaattatttttatttgtcatattrtttggataccagtattacttacctttaaacctttccgttttgtgggattgttattattatatatggtaccttctgcaatacctagctatttagaagtaatcgaagtgacaaaataccataatatatggagatgatgacagggcaaggagaaggaatcaaacatgcagtacctggtattatttccttttaatttgtttgctattattatttacattttaccttaaataggagacaagttaattaaatatccaattttcctatttgtaagacaaagaaaaaacttatgtttggctttctgatttcaagatttktatctttcttgggatatgtattttattaaaatgtgtaatttggtgatttgtatgtttatgaagtttaggggtggctgaaagtctcacattcttctaagagtaaagtctaaattggaaaatagtaaaaattgcatactcacaaaattaggcatattctaaatcatagtataactacatctttaattatgtctcccgaacattcagtagaaaagggaaaataacactcagaatcccagtagatttaggaagagagttaggaacagaagacagtctccctttagttttgctcctcttttaaatagtagtggttttttatgtgccttccagcttctcccccactgtgcccttcttcttcccacaggtctccagtccccagatttctgtgcatcctctctcatgcaaagaaggctggaagacaaacttgtgaagctagagggtgtttttactaaacactaaaggagttttactaaaggagtttcaagtgagtgccatgaaaagacctaattattcttaaggagaatggtatttctgtatgttcctacacttgaattttgacaatatttttctatgaagcatcagagctgttcaagccacaattccaaaagggtgtgtgcttttttagatttgatacataatatttttgaataaaagtaggctttttgctggggctaaatattaatattctttaacaatcattccaatccatagagtgagattacaaaatctttactaaggaaattgcttgtaaagtgtaatgtcaaacaaatattaataacgtaaacacattaactatatattggtaaataatgagtgatatggtagataaatgaaaaacaaatgctatcgattatgatatagtttttaatgacattcttttttggcttggataggcttttctatttttttttttaaacttattttgagataattgtagatttgcatgcagttttgaaaaataataatacataataataataccatattccctttatccagtttctccccatgrtaatatcttgcatacctacagtactgtatcacaactaggaaaatgacattgatactacccgctgccattatttagatactaccagttttacatgcactcatttatgcatgtgtgttaattctatgcagttttattgtgtgtatagattcatgtgaccacgccacagtcaacacacagaacaggtttatcacaaggatccctcctgccaccctttcaaagcgaaagccactttctttctkctcctcccccacctccctaaccccagaaaccactaattctgttcatctttatcattttgtcatttcaaaaatgttaartaaatggaagaatccactatttaaccttatgagattggctttttcattcagtattattcctctgagacaattccagttgttgtgtgcatcaatagtttgttccttttcattacttggtagtattccgtgtatggattaccagtttagctattcacccatgtgggttgtttccagtttttggctatttggaataaagctactatcaacatttgtgtacatgtttttgtgtaaatgctttcatttctatgggatgaagagtacaattgctgggttgtacagtaagtatttgtttgatttgcaaaacactgccgcacttttcaagagaggcagttactgtttcacatttccaggtgcaatgtctgagtgatccactttctccaaatccttgccaacacctgatgttatcactatttaaaaaaaaatttagctattctggtaagcttgtactgatatgtacccttacctaatagccaatgatgctgaacatcttttgatatatgggtatcttagtgaaatgtccatgtctttgtccctaattagattgtttcttacacagttgagttttgaaagctctttatgtattttagttacaagtactttgttggaaatgtcttgcaaatattttttttccagtctgtcacttatctttccatcctcctcacaggtttttcacatagcatacatttttttaactttgataaggtcaatttatcattttttcttttaagaatcatgcttttggtgtcaagtgtaataactctgcctagttgtaggttctgaaaactttatcctgtgtttttcttctaaatattttatagttttatattttgcatgtaactccatattccattttaagtaaattttcatacttagtgtaaggttagatcaaggcctatgaatgttcagctgctccaacaccatttgctgaaatgctgttccactgaattgtttttaaacctttgtcgcccatcaaatgtgatttaatatactcatgagaacactttatttttacccattacagtgttctttcctttctgaagacctctggatcctatttaatcttcatttttagcaggcagtcctgctgttcaggtgtagtataaggactgggtggatgtgttggttcagccttccattgggccctgccatcaccactctggcaaaagtagagcacagactgcctctcattgcagatgggtgaggtggcagctcagctccccttctggccctgctgacatcctcctggcaaaggtggggcactgatttgcacatcctttttgctttccagtgggactggaagcttacctccccagtggaacctgatgacacaggggaggtgacaaggaagtggagtgctgcgtaggcccgtgtcctacctctttgtttcaccttgttgatacccaggtgggaatggaggctcagatccctgctgaaccctgctaacaccagagagggtatattagtttcctttggcaactataacaaagttccacaaatttagtggcttaaaaagacaaatttgttgtctcataactctggaggccagaagtctgagagcagggccacactgcctctgaaagctctaggggagaatcctttttcacttcttccagcttctggtggctccaagtgttcctgggctgtggctgtaaaactccagtctctacctctgtcttcacatggctttctcctcttctacgtgtctctatcctctatgtatctcttataaggacatttgtttttggatttagggccaccaggataatccagggtgatctcatcttgaggtctttaattatctttgcaaagactctttttccaaattaggtcagattcacaagttccagggatgtgacatggacatttttttggtgggtcactgttcccactacaccctgatgcagggtggggatggaggcttagcatcctgctgggccttgatgactccaggggtaagagtaggggtgggagagggtagtgaagctccctggtcactagcctttctttgcactacctagctgctatgggttgaatgtccctctgcttttatgaatggattaatgttattatcacagaagtggctttgttataaaagtgagctctctcttgctgttaccctcgtgtcatgtgataccctccaccatgttatgatgtagcaagaaggccctcaccaggtgtcggtaccacactcttggacttctcagtctccagaattgtgaactaaataaacttcttttctttataatttatacaacctgtggtattgttatagccccagaaaatggactaagacattggttaagtctcattgctgccagctggaggtggaagctgtctttgtctctggacttcactcatactgcctatgttacctcctgcttctgctgagtggaagatagaaatcagctccctgcttggtcagtctacatcacctggaagggcaatcagtgctgtctgcatctgccaggtagaagatgggagattagctccctgctcagctttgtagacaccatgggataggggtgtgtcagggcaccaccatctgcttctgtgggacaggggtgggtaggatagaaaagtgtctccttgctctgccacactgaaaccatgggggtggtttgtaggttgatgcttggctggtgtagggtaggcattataaaaaagtgttttgttctgttaggcacctggtcctatgactaggaggagaaggcttttcatgcatgcagttgtgtgtgtgtgtgtgtgtgtgtgcatgtgtgtgtgtttctttcccacctgggatatgtgggaggcaataaggaaacccagagaactcactgaatgtcattccttaagtcccgacgtccatagatagcttgctgcattctttccacctatgcttgagttttcctatgcttgtttattgtgttatgtgcagggtctttaagttttaagaggaaagacttgggaggaatgggctattgcatcttggccacaccagaaattgtttgatgactcattgcatttaaaattctaaatgtcattggtcatacattttagtggaattcttttcaatttttatgttcatgtttcctacaattgtcagtttaagcagtaagtgaaagaaaaacaatttaaaatgtattttaacttttagttaatgctgacctctgactgtatctgctttcttattggtccttatacagaggattttacagggacaaaagcaaaagataaaaatatactaataacacttatttaacatcattcttacgtgagattaaaaacggtatttaatgccatattcttgtacaactatgagttcttatttttatgaactatcttcagccatgtgtacaagaatactgtctagaatagtttaacagtattatttatgtgcgttgacttagaagtaaacagcaataactactacacatgattttatagcagaacggcctcatttcttcttttggtatcatgaatgactattatgatgaaatccacgtcttgatggagttctgtgtgcctttattccatcttttgcattgaggatgaagtttactaagttggaaggcatggttttttcaattattgatggggacaattttcctctcatttctgtctggacaaacatcactagtttggaatatgctgggtttctgtaagcaaaagaagagttaaaaaaagataagaaatttttagatttaactactgactttacaggtttttggagagcaggattcttatcttattcaccgttgacatacttaaaaattgtacttaaaaatattaagtggctagaatatttcttaaaatcttgagttttaggcaccatttcctttttgtcattttattgactttaaaaaattctaacagtaatgtatgcttattatgaaaatttaaacaatataaatttttcataattaaagaaaattttccctccctcatttcccttatcctgtttcccagagataatcactgtttacagttttaattgttatattttcgcgtgactatctttctctctctctatatatatacacaaaaacagcatacatttgtacataaatgaatatgttccccacatatataaatatagttttattttttaatggagatatttttctgcaactagttttatttttatcttaataggacactatgaacttccttctgtgtctgtacatacaatctacttaactgtttttcatggctacagacagtatttcattttctatttaacagtccttttattgactatcatttaggttgtttctcacttttggctactgtaagtaaagctgcaataaaatatctttgtaatgtatccatttatgctttttttttttgagacagggtcttactctgttgcccaggctggagtgcagtgacgtgattctagttcactgcagcctcgaactcctgaatttaagcgattctccagcctcagtcttctgagtggctgcgattacaggtgtgcccaatcatgcctggctagattttaaaatttttttaaagagacagggtctcattatgttgccaaggccagtctcaagctccttgcctcaagcgatcctcccacttcggcctcccaaaatgctgggattacaggtgtgacccacctcacccagccccatttacacttttataaatacttataatttctaggtcaaaggtttgtgcattaaggtttttgacacattaattccaaactgcactctaagtggtattttatattctagcccattgatcttcacactggggtcagaaagggtgaatacttttaagagaataaattttccaatctctaacttccatatgcattttttccgtaatcagatctgtaaatatgtctctgttggagatgtgggctttttctttcctatcagcctgttcaaaatcgcccttctcttgctttatgcaacaaaggcatacctgttatccacactaagtggtactatggtgctttaccttggtatataaaaatctttgagatgctaaagggaaaatctgattagtggctagttgagaaaaaattcttttccaagtcatgccatttttttttttcagtaaaacttaaggatctaattgagttgtcagctgacaggtcttttttttttttttttttcttttgagacggggtctcactctgtcacccaggctggagtgccgtggagtgatctgggatcactgcaagccccgcctcccgggttcaaacgattctcctgcttcagcctcccgagtagctgggactacaggcctgtgccaccatgcctggctaatttttgtatttttggtagagatggggtttcaccatgttggccaggctgatctcgaactcctgacctcaggtgatccacccgcctcagcctcccaaagtgctgggattacaggtgtgagccactgtgcttggccaggtctttttttaatgataaacattttttgatgataggttactacataatttatggtatataattcataaattttttatataaaaataaaataaaaaatatttttatataattctcaaattttatttttatttattattaaatcaaaaattaattgaatgacagtgctggaattatactctctccatttcaacacatttatgttaataaattttctttgattttcttaaaatgaaagcagtagtagacttgatattgaatgctgtcttatttttcagtaatatacacccacagttaaatgaaatgagtgtaatggttaaaagcgtggactcaggaactagtctgccttgatttgaaactgagctttgctattacctatatgtaaccttcagatagttaatctctttgggcttccactttctttcctgcccattgggcatagtcacactacctactttatggggttactttgaagatcaaatgagtcaatatatacaaattgtttataatagtgcctagcacatagtaagtgctatttcagttttgctaataataaaatatgtgtttctaataacagtttgcattatgtttaatatttgtatacaaacatttttaattttgatcaatatataatga

SEQ ID NO: 95083 - DNA, 68004 bp, Homo sapiens
gctcacacctgtaatcccagcacttcgggaggctgaggcaggcggatcacgaggtcaggagattgagaccatcctggctaacacggtgaaaccccatctctactaaaaatacaaaaaattagccgggtgtggtggcaggcgcctgtagtcccagctactcgggaggctgaggcaggagaatggcatgaacccaggaggcgtagcttacagtgagccgagatcacgccactgcactccaacctgggtgacagagcgagactctgtctcaaaaaaaaaaaaaacacattttttttttgagacagagtcttgctcttgttgtccaggctggagtgcaggaaatcgaattgaaggagagaggaatcagcattgtcagaatgcagcagagatttcatgaaaattggtcattgggttgggcaataggaaggccatgtaaagaggagtttcaggggagtagagctggaaaccagactgcatcatgggttaaaatgtgagtgggaagttgaggagtgaatgataagtgaagtcagtgactgcatacagcttgctttcaggaatttgaggtaaagaaggtgaagatgttacgtgtcatgtcttcccccttcagatgattctaagcaccttgagacaaatgtctagtaatrtaccacgtgtgcaaccatattcagtaaatattaatgacaggaatgattctaataaaaatatcagcactaaacccattaggtttttacttagcctttctttgtactaatttatttcctttaaattgttttcttccagtctattcaatgacagaaattgtatgggtactgagaagcttcccacagaaatccccacataccattttgagacactggactcaagccatttcctgctttggtcataaaaaaaaaaatagtcgctgttatttacacagtaatcagaattccatcaggaaatgctgtgtgcattaaatctaagtcatgttattgttataatcactagtattagaaaaacaagtttgtgaccttgttcatctctaaaaaatttaatgttgtttagcaaagttgtaatgaatgggaagttgggctttcagaaatcaaaggttgatctatgtaccctgtgggtgctctttaaatagttaatgaatgactaatcagtgatttcatggcctctaacacaggtgagacgattgcctgagcaggtatatttgaagaagcaaactcatgcaaagggagtttccttctggcctgaaagattctcatggacacttcagtgatattcacatcacacacataaaactgtatttacttattctaaaatcgcttacaaatctgaaacaaaacattataattatctagacaataaggtaaaaaaagtggatactttttctaagtttgctagaaatttattctgggaaagagtttgagttttatggaaaataatttctatcatgagaacactgacatttttaagctcccccaggttacaggtcattgcattagggtaaaatgttaagctgattcatattcagattgcttccttctaaaatcataggctttattaatttcctcttttcttattgtgtttctcatttttgatggcctaatcttcatttattagtactgtggccartgaaagattttcatttattccacgaacatgtacaaagacaagatccttgttaaggatctctgggagtctcagggacatttgaaacacaatccctgctcaagaagtttaaagatgttacaattcagtgaagaaatatgaagtagaaaatatcataaaagattatatactaatgctgaaatgaacatgggagtgcagatatttctttgacatacaaattttatttttatttttatttttaagacagagtctcgctctgtcacccaggctggagtacaatggcatgatctcagctcactgcaacctccgcctcccaggttctagaaattctctcacctcagcctcccgtgtagctgagactacaggcacacaccaccatgcctggctaattttttgtatttttagtgtagacggggtttcaccatgttggtccggctggtcttgaactcctgacctcaaatgatctgcccgcctcagcttcccaaagtgctgggtcaggcgtgagccaccatgcccagtctgacacgccaattttaatacctttgtatatacacccagaagtgggattgctggatcatatggtaattctatttttagttgtgtgtgtgtttttttttgtctgctttgttttgtgagatggagtctcgctctgttgcccaggctggagtgcagtggcgcgatctcggttcactgtaacctctgtcttccaggtgcaagcaattctcctgccttagcctccagagtagctgggactacaggcacgtgctgccacgcccagctaatttttgtatttttagtagggacggggtttcaccgtgttagccaggatggtctccatctcctggcctcatgatctgcctgcctcggcctcccaaagtgctgggattacaggtgtgagccaccgtgcccggcctatttttagttttttgaggaacctccatactatttttcaaaatggctgtactaatttacattcccaccaacagtgtacaagtgtttccatttttccacatcctttccagcacctgttatcattcatcattttggcaatagccattctaacaggtgtaaggtgacatctcattgtgtctttaatttgcatttccctgatgattagagatattaagcatttttttcctatacctgttggctatttgtatgtctttttttgaaaaataactgttcagaacctttgctgctttttaaaaatcagactattttcataacattgatttgtttcttatactcccatgttcatttctgcattatttacaatagccaagatataggaacaacctaagtgttcatcgacagatgaatggataaagagaatcttgtatatatatgcctactatacagccataaagaaggaaattattcccagtactttgggaggccgaggcgggcggatcacgaggtcaggagatcgagaccatcctggctaacatggtgaaatcccgtgtctactaaaaatacaaaaaaattagccgggagtggtggcgggcgcgcctgtagtcccagctacttgggaggctgaggcaggagaatggcgtgaacccgggaggcggagcttgcagtgagcgagatcgtgccactgcactccaggctgggtgacagagcgagactccgtctcaaaaaaaaaaaaaaaaaggaaattctgtaatttgtgacaatatggattaacctagaggccatgataccaagtgaaataagccaggcacaagaaaacaattaccacataatctcacttacatgtggaatctaaaaaagtttatctcatagaaacagtagaaaggtagtcaccagaggccggtgggcagggaggatggggaaaggggagatgttggtcaaagtgcaaagtttcagttagactgcaggaataagttttagtgatctaatgcactgcatggtgaccacagttaataagaattgcaaaattgctaaaagaataattttttaatgttctcatcaatgaaaaatgaaaagttggtgaggcaatgtatctgttaataagctttatttaatctttctacaatgtatgcatagatcaaaacatcccattgtatcctataaatatacacaattattatttgtcaattaaatattttttaaaaagtacatactaagttccatggatgtctctccaagtgtaggaactggaccttatacatctttgtatcccaaatgtcaagctcagcttgtcacagagtaagtttactgaattgaaatcattgagagactggaactgggttaggaggaaaccaggaagacgacttaagacagggagaacatgacctgggtctggccctaaaaaggataactggggcctgtatataggaatatgaaaaagagcttttggccaggtgcggtggctcacgcctgtaatctcagcactttgggagtccatggcaggcgaatcacgaggtcaggaggttgagaccatcctggctaacatggtgaaaccctgtctctactaaaaatgcaaacaacttagctgggcgtagtggcacgcgcctgtagtcccagctgctcaggaggctgaggcaggagaatcacttgaacccaggagctggatttgcagtgagccaagattgcgccactgcactccagcctggcgacagagtgagaatctatctcaaaaaaaaaaaaaaaaagaaaaagaaaaaaaaaaaaaaaagctttcaggttaggagggagattgtattaatatgtacatgtgacatgttgtagatactagaattagagcttctcaggtccatcaggatctcagatgggttgttgacttttactacatgtctacttggcagtgataggcagagctctagggtttgcagtaaaatacatgagtttaagtcatttgaactatttcaacttttaatgtgcatgcaagatgtcggaaagctgccagtttcacctagaaactaccttcttaggcttggtgaagtggctcacacctgtaatcccagcactttgggaggcagaggcaggcagatcacttaaggtcaggagttcgagaccagcctggccaacatggtgaaaccacatgtctactaaaaatacaaaagttagctgggtatggtggcgcaggcctgtaatcccagctactcgggtagctgaggcgtaagaatcacttaaacccgggaagcggaggttgcagtgacccgagattgcgccactgcactccagcctgggtgaggaagtgagagtgtctcaaaaaaaagtcttcttaaaacaacaaacaaacaaacaaacaaaaaacaaaaagtaaggccaggtgcggtggctcatgtctgcaattctagcactttgggaggctgagatgggtgggtcacctgagctcagagctagagaccagcctggccaacatggcaaaaccccttctctactgaaaatacaaaaattagccgagtgtgtggtggcttacgcctgtaatcccagctactggggaagctcaggcaggagaatctcttgaacctgggaggcagagattgcagtaagccaagatgacgccactgcactccagcctgggcgacagagcgagactccgcctcgaaaaaaaaaaaaaaagtaatcccagcactttgggaggctgaggcgggagaatcgctcttgaggagtttgagaccagcctgggcaacatggtgaaacctcgtttctactaaaaataaaattagccaggcgtggtggcgcacgcctgtagttcatgctactcaggaggcttaggtgggaggatcgcttgagcccaggagttcgaggttgcagtgagctgcgatcgcatcattgcaggccagcctgggtgacccagggagaccctrtctggaaaaaaaaaaagcggatagactagtcccaactctgaatgttaaaagaccaggactgggtatcagaggacctccaatccttgctcaccttacctcacttctctaggcctgtttcttcctatgatatgagcgggtggcttccaccctcgctgtctaatacagtgggcactagccagccacatttgactatgaaatgggtctagttcgcatcgaatacacactggatttcaaagacaaaaaaagtcaaatatcttatgaataaatttaatgttggttatattttgaaataatattttgcacattcggggttaaataaaaatattttaaaaataaaatgtacctgttatttttactcttttgctgtggctactaaaaatataaatgacatatgctgccctggtctagatgctctctaatatccctttcagctttaagactccgccgggaacacggtggacacgtaattcgtacgatttgattgtctcgcattgagatacggaaggattggccgggagtgagcgggctggggctgggcggggcggcgcggggcgggcaccccccgccccccaaccccgcaggaaaacacaggcccctccggctttcgctctcgctctgggaactggaaggacccccgactcccgcgcagggtctggggttgtgcgcgtcgggttgcgtctccaggccgggggcgtcagggagccgggggcggggacgggcgcgggcgcagcggaccgggcggggccgagccgggaagctggtcggtgcgtcagcctcacgcggcgggaaggaaccggtccgaggccccgggctgccggcgcgggcgccgcggcacgtccacaggctgggtcgcgaggtggcgatcgctgagaggcaggagggccgaggcgggcctgggaggcggcccggaggtggggcgccgctggggccggcccgcacgggcttcatctgagggcgcacggcccgcgaccgagcgtgcggactggcctcccaagcgtggggcgacaagctgccggagctgcaatgggccgcggctggggattcttgtttggcctcctgggcgccgtgtggctgctcagctcgggccacggagaggagcagcccccggagacagcggcacagaggtgcttctgccaggtgagcgatgtgcgcgttggtgctgagggtcccggcgccctccgcggcgtgcactgtcccgcacgccctggcgggtgagcggctgggggtgcgtccttgcatctcttcccaccgggaatgagactccggtgctgctgcccggtggccgggactgagtctggcttggcgtggaccgggcctccacggcagcctggacgtcgccgcgccctccggtgcctcggaccaggagaggggttgggtgcacgcggttgagtgggtttatgcatctttgttggtcttatctgcccggggagagtgtgcacagtgtataatgccctgccagtatttgctattttcacagaacctggatmtttctcacttctctcttgaccaggaacttgtgtacccagtacctgtgctgcgtgcatttcgccagcctttctggctaagacgtttgtgggctgatctcagatttcgatgttaggcggaagaatggctgcttgcggtttttctgtgtgtaagcccaactacctgatgtctttgggactgcagttgccctctggtttctggtcctgtgtgctctttttctcgaatgtaatgagattctcttatcgtgacacccgttaagctggtacgaattgggaggaaggtccttattcttcagtgcacaagtttaattacaagcggattatgatcatttccttctgtaagagatgtggtttcttgagcaaaaaattgagagaaacttacagttttccattatcttcagtatctagtatttcaatgtgattactcttgtcaaagccactttttggttgactctgttgataaaaattacgttttatacaaaattaagggttaggcatccatgttattcctaagtggattttgctattaatttattatcagaaataccattttatgtgtttaggggcatgataccatgtcaaaggaaagatgcatttaaatattatgaaaggtttctctttcactactttacattcttggattttgttgttttgctgagtgatttgggagttgaggtgagtgttatctaggaaactaagggaagttgaaagaaaattgctactttacaactgagacattgaaaagtcctttaccttcaatcattacaaaggacacacaatcaagtacttaaaaggaaaagggtcatttttcttctgattagaaatataacgcaacaccgagattaaacatttaaaaaataagatagaaataagtgactttaaaataaaatattctttacggaaagaagatgtccaatgtaacattttcagctacattctggagatttggatactggaataaaagtacatgttgaactcttcaacttttacttttwttttccttaataacctttttggagttctgcttaaaatagaactttaaattctttgcatttattttctttttcttctaactagtgattaaacttttcctctttcacaataccctcatattcaaatacttccctaacataaaattctgttaaacccctttctttttcttttagaacgagagtggctatctgtgtttcttttcagactcaaccttgaaaaatagtaaattgggctgggtgtggtggctccagcctgtaatcccagcactttgggaggctgaggtgggaggatctcttgagtccaggagttcaagaccagcacgggcaacatagtgaaacccccgtctctacaaaaaaaattaaaaaaagaaaaaagctgggtgtgatggtgtgcgcctgtggtctcagctacttgggacactgaggtggsaggatggagtgagcccaggagttcgagaccagcttggagacccggtctgtattagtccgggttctctagagggatagaaccaatggaatatatatataaagggagtttattaagtattaattcacatgatcacaaggtcccgcaataggctgtctgcaggctgaggagcaaggagagccagtctgagttccgaaactgaagaacttggagtttggtatttgagggcaggaagcatccagcatgggagaaagatgtaggctggaaggctaggccagtctctcacgtttttctgcctgcttatattctagccatgctggcaggtgattagattgtgcctacccagattaagggtgggtctgcctttcccagcccactgcttcagtgatcgaggctgcagtaagccatgattgcatcagtgcactctagcctgtgtgacaaagtgagagtctgcctcaaaataataataataataaaaaagtaaattgaggatcatatagttaaaaaaacagttttaacagaaatttagaaatttagaatggtctacttatttcatgatttgagggagcctaagcaaaaaaaaaaaaaaaaaaaaaaaagttgtctatttaagaacagagactatcaattccaattctataagtgaaacaatagggccagtagtggaagggatgaggatcgggggagaagggaggagaggtggcactgatgaatagacatgcagagaaaattagaggcaagcayatagacagacatacacagagaaacagcatgagagggaaaagaaaaaaaatggagaaagaaaaggggagataaatggtgcaaatcattcattcaacaagtgtaaccactctgcacgttgaccagagtgtttgggacacagaaataactatggcattatccctgccctgaagagctatagtttagtgaataatgttcattggggattcgtgggaggcacagatcctaagcacttaaaaaacaagttaggaaatattgctagaaactaagttaaaaactaaatttccaccagatgtttggaaatacaagttaaaatcttctctggttctgtttacaatatccagtgagctgcacagtcccgttgattgttttggtaatagttttatcttttcttcctgttgcctgtccctcttaccacatctgccttgggttaccacatccccatccatcatcacactgctgcatggtgcctggcttatagtagggttcagttcacagaatgtccgctctgatttgagctagagcagtgaccttagaaagtcactgaattaaaatgtgtagagctctacaagtaatcagattaaattcatcaagcatatgttgaaacctactgtgaacaatttttgggagatcaaaaaatgaattaaaggtgtgacacttccaagaagtgagcctggtgaataattggtgctcaacaagtcctagggaaattataagatgcaagcactatgccaacaggagtatattttaaaaattattctgcttagcaagccatttgcatgttttctggaactgatctttcagattggttgatagctccaactgagtctttgaatttggtcagttgctacatatgcctgttagttgatatcaaatcctgctaaaattattttcactgtatgttgtaagttcctttgataatagtgcttaagtgttagttgctcaaaatgaatgattaattgccttagacttgtaaatctgtatatgtaacctcatgtaagaattgtatatacaacctaggccaggcatggtggctcacgatgtttgtaaactcttacttgctcatgatgttttatcartcttaatatggctagtgctagtaacactcaggatagcttatttgagcacagtaaatctctgtcaggctaatgaaaggggagagtagctcagagtccaaaataaatactccaaaaatggatcttttttagcttggagcgcatttagtagatttaacctgtcaagtgtcttgttargtcagttgaaacaatggttttaattgttagcctggtggctgggccgtgggagagacacttgctaatatgttgagtggtggatggaaataagcccaggattataacttagtcagagggatctttgaaacaggttacactggagaggtgtccactgactctatgtgtgtgctgcattccaggcttttctgaataaactgtgtggaagaaatattttcctgatggttgccagtcatttgacaatttaaagtttcggcaagactaagtctttaaagccaaaatgacctgtagcgttctaggtccttaggatggtgcctactacctggtgtggaatctttggtatttccctgcttccattgacagacttgtcccagtgtacttctgtcaacagatgagtactttttatgttatttttttatggtgataaaacacagtaaaattaaatacacctgaagttctttgccaaataaagcacactttgagcacattgatttatttatgtatttctctccacctttattgacacataaaaattgcatatattggctgggtgtggtggcttacgcctgtaattccaacactttgggaggctgaggcacgtggatcacctgaggttgggggttcgagaccagtctgaccaacatgaagaaaccccatctctactaaaaatacaaaattagctgggcgtggtggcacatgcctgtaatcccagctactcaggaggctgaggcaggagaattgcttgaatccgggaggcagaggttgtggtgaggtgagatcgcaccatcacactccagcctggatgacaagagcaaaactgcgtgtcaaaagaaaaaagaaatgcatatatttaaggtgtaccacataatgttttgatatataaaaggtccttatcctttttttttcttttgagacagagtctcactttgtcactcaggctggagtgcagtggcgtgatcttggctcactgcaaactctgcctcctgggttcaagtgattctcctgcctcagcctcccaagtagctgggactacaggcacccgccaccttgccctgttggccaggctgattttgaactcctgacctcaggtgatctgccctccttggcctcccaaagtgctgggattatagacatgagccactgtgcccggcccttgcccattttttaattgggttatttgtttttttgttgttgagttgtatgagttccttttatattttggataataacatcttgtcagacagatggtctgcaaatattttctcccattctgtaggttgccttttcattttgttgcttgtttctttgttacatagaaacattttagttgcatgtagtcccacttacttatttttgcttttattgctggtcttcttggtgtcacataaaaaatcattgccaagactaatgtcatggagcttttctcctatgtttttttctaggagtcttggtgtttcagggctaacatttaagtctttaatcagcttttagttgacttttgtgtgtgttgtaagataaagatccaatttcatttttttgcacatggatatccagttttcccaccaccatttattgacaagactgtgctttcccattgtttggtcttggtcaaagattagttggccagacatgtgtgggtttatttctgggctttctattgttttccattggtctatgtatgtgtttctatgctgatacaacactgttgtgatgactgtagctttgtaatataatttgaaattacaaagtaggctgcttccaggtttgttcttgcaaaattgctgtagctacttggggtcttttgctgttccatccaaattttacaatttwtttttctatttttgtgaaaaatgccattggagttttgatagaaattgcattgaatctgcagaacactttgggtggtatgggcwttttaacaatattaattctctcaatttatgaacatgggatatctttccatttatttgtgtaatcttcagtttttttaatcactgctttatagttttcagcatactgatcgttcctctccttgttaaatttattcctaagtagtttattctttttcattctattctaaatagaattgttttcttaatttttttttggatagttcattgttagtgtatagaagcacaattgatttttgtatgttgattttgtatcttgtaattttgctgaatttattctaatggttttctggtggagtctttaggattttctatatataagatcatgtcatctgcaaaaagagacaattttacgtattttttatttggataccttttatttctttcactttcctaattcacactttgagcatgtttaaaaggtatttcataaaaaatgtatatgagggccgggcgcagtggctcatgcctgtaatcccagcactctgggaggctgaggcgggtggatcacctgaggtcaggagtttgagaccagcctgaccaacatggtgaaaccctgtgtctgctaaaatacaaaattagccgggcatggtggcaggcacctgtaatcccagctacttgggaggctgaggcaggagagtctcttgcacctgggaggcagaggttgcagtgacctgagattgcaccattgcactccagcctgggcaataagaataaaactccgtctcaaaaaaaaagtatatgaggaatatattcttatagtgctttgtgtgaaaaaataaaatggtaatgtataataagactagaatatattggtatacaagaaaactttagaaagtgttgttttgtctttcattgcaaattaaaggatacctctgacatgagagtagtgaacaagcggtacgtggtaattttcctttatcctgccttttgcatttggtcaaatcaaacagagtcaacagagaaggtaattgaggctccctccacagctaactgttggttatctagttctttgttccattggggctacagatgtcaaatttttgggaaattttagctgcaaattcggctgtatttttcttattcattatgaaaatgccatgtgctgctttgggaagtaatacatgcttccctttcattggaagcatttaagtagaagtagggtaataataatgattaacatgtactgacaatttactttgtactatttatcttggtatcaactctttgagatgagaactattactattttctattaagatgagaaaccaaggcctagagaggttaaatagctgggataaagtgaaaaactaatgactggcagagatgggattcaaacctaaggaggtctgatgttagaacatacacgctaactattgttacacactacctgttccttgagggatgtgaatggagggatttgctgttttgcttgggagattgtaatagaaagccttccaaggctttctaactcttaaaagactaggactttttttttttcttttctatytttttgaggcaaggtcttgctctgtcatttaggctggagtacattggcatgattatggctcactgcagcctcaacctccctggctcaagcgattctcccaccttagcctcctaagtggctgggactacagatgtgcacccaatgcctggctagttattttatttttttgtagagatagggcctcactgtgttgcccaggttggtgtcaaattcctgtgctcaagcaaccctcctgccttcacctctcaaagtgctggaattacacgtgtgagccaccatgctggaacaraaggctggaattttgaagtggtccatgttacttgtcaggcctaccttggtcctcctatttactgttcctcaactggggccttcttatctctgcttattagattggccctctaccaaaagctatcattacttgaagcctagagcagttagcctcaaatgttaggatactaacctttaaaacacattagcatttaaaaaaatttagattcctgtggtaggtcagagttctgttttactttgggatatagcgtagtaattttcccccttaccygcattgttccatgtagtagttatttaggcagccttagcacatcctgaaacaacatccagtcctccctgttccaggttgccacctgtctttggtcttagttgaggtaataggattttgctttgtttcccggatcctgttctgtgtctattaactgtattttaccttagccctttcctgaggctctattcttttttgttttttgagacagggtctcactcccattgcccaggctggagtgcagtggtgcaatctcagctcaccacagcttcgacttcccaggctcaagccatcctcccacctcagcctcctaagcagcggggactgcaggcgtatgccaccatgcctggctaatttttttttgtagttttagttgagacagggttttaccatgttgctcaggctgatctgggactcccaggctcaagagacctaccaaccttggcctcccaaagtgctgattacaggcrtgagcctgagattctattctagtaacatgctttgttctctggtttctagaactggtcctgccaccatctttgccagactctctcccagggatcaggttggcaggcttatctgagttgtcagatggcatggatttccgagaatcttcytgtctttcctttactgagctgtyttcatccattgaaactcctgccacccttatactcccttagcagccctgctacctgtggttgtagttaagaatatctcctactccatatttcaggaaggggcaggacatttttttttttttgagatggagtctcgctctgtcacccaggctggagtgcagtggtgtgatcttggctcactgcaatctctgcctccccggttcaagcgattctccggcctcagcctcctgagcagctgggactacagmcatgtgccaccatgcccagctaattttgaatttttagtggagacagggtttcaccatgttggctaggatggtctcaatctcttgaccttgtgatccgcctgcctcggccacccaaagtgctgggattacaggcgtgagccactgtgcccggccaagaacattttaaaatctaccaatctaccatttatcctgccttctttccctttgaggtctcttggctatakgccacctctgctctggaggatttttgcatttctttctggtttggggcttcttagagcttcctttgtaattargatagagataggaagaatgatagacacaaaaggtgtttacctttgctgcttgctttacttgctatgtgtgtttctgcctcctgtgcttgtgtactctggggcactgagcacaccataggtgacatggtgctagatatgtttaatgagacagtatggtgctggtctccagtgatgagtgacaatggacaacattcattcattcacccacctcttccacaaatagtaataatttatttgtgacagaatctcactttgttgccgaggctggagtgcagtgcagtggtgtgatcttggttccctgcaacctctgcgttttgggttcaagcgattctcctgcctcaggcgcccaagtagctgggacaacaggcatgggccaccatgcccggctaatttttatgtttctggtagggatggggcttcaccatgttggtcaggctggtcttcaactcctgacctcaagtgatcctcccgccttggcctcccagggtgctgggattacaggccacaaataattattgagcatctactgtgtgctttctggaagtatatgatttttcactcaaggattttatactttagtgggcaggggtaaaatagataaattcactgctgtgaggtacagtaatacttagataatagtgtgtggagtrtcttgggagcagctgggagaggcatttaacccagcgggtggtaaggagtactggaaggacagcttcctgaaaaaggtgatactgagctgaggcttgaagatatattttaaccttaaaaatgaattcctcagggggaagaatggatgccttgaaacttgctctcaagtttttcatgtgtttctttttgtaacttaatgtctctactttgcatatgtccctttggcctttgcagtctctatgtctgtcattctttgcataataattcatatcaaaggggagaaacagctattttttgtccctagaagttctgctcttaaggttgaaaagaaagtttgaaaaatcatatcatttaggttagaagtactttgtgttgttggtatccaaaattaggactctgagattcttgtgtattcagagaatttttagtaggaaacaaggacaaatttgcatatgaaatgaaaatagttattacatgacaaaatatgtagatctgatttctagaaactgaattagtccaaaacaagtaagagtgggaaaagcagtaaaaagttcttcttgaatattgctgttgtcatccaaagtattcttatttcttttaggtgaaaaatttccattactcttttgtgatattctcaaaagaaagtttaggattttacagtgttctgaaatactgaatcttaattcagtatttcaatagagtattattgatttgcttccttatcagtagatttttaaattatttatttctaggctatagatcttcctaaaatataatccaaagtagtttaaaatgcagatatctagaccaaagtataaagatctcttttctggagcatgctatatttaacagttttttcctaagtttgtttttgtttttggaatcatgatatatttgtttcttaaagcaatctttagttctattagatgtttttctagctcaaataaacatctaagaattttagtttaatttggcaagtaacactggtgaaaaaaagaaaaaaaaagaattctagtttcataattgataatatttattatcattaccattgtatcctaggatatgtgcatttagtagcttgatttagtacataccattaagacattagctttaaayatttgaagagcaggattgactttgaggtcagtttgctgtttcattgttactaatgataartggtttctaagcaccattccaaacctttaagaaattgttacagcccaatatttgaggattgttagatccttactgaaagctaaggatgggaatgcagctgtgcctcaggaaggacagtggaagtgggagctggaaacccctcagatacccaagtagcatatactctatctcctacctctgcttctttgtgtatctttttttgscccccaagaattccgaggacaatcaagctttgtgtatcttttaaaaacttttcctctctttgccaactggatcatgtgctcctcagttcacatgatggagtatttgttttactggtctagccacagggagacatctttccctgttattctcaattctaggatcctggagaggggaccatgacctggtttgagttggatgcctacccttggtcaggtcaactatggcctggagggcagagttacaaaataaaggttgccagggggccaactctctgtgtgtgtgtgtgtgtgtgtgtgtgtgtgtgtgtcatgagctctgcacaccttccattcctcggtatatagcaagagcagcagtattactagattattgtcataccccatctcaagaaactatgtgggaggagggaggataaggactggttgagtagggggctgtttcctaacaascatgtgaggaaaaagaaccctgttgcatttaggacatttcaatttaatatttcattttctttgtaacaggttagtggttacttggatgattgtacctgtgatgttgaaaccattgatagatttaataactacaggcttttcccaagactacaaaaacttcttgaaagtgactactttaggtattacaaggtatttttaattttaattttttatatatgaatactttaaatggataattagattttcttaagaattactgagcttcaaaattgtagttgttatttaaaattgatataggctttattaagaaaattcagttcrtaagagtgaagcatgtgattctgaaaccatccattggataattttaataactgaattttacactctagagttagaayctagttggttaaattgaagttaggacagaaattattatatattgttatcaaaatggtgagatcataattttctaaaacatcagattggctccaattaattaaaataattaaatattttttgtagaatcatgactttatcctgacctatattatttaaacaaatcacttgtgctgttttatcttgagatatctactagaagagtttagaaaacctratcaatggagtatttagttgtagtcagtttacaattgtctatcctctacctgttaactctttcttgtttgaaaagaatgtgagtcgagctactttggctcctagttgccatctgttcagggtctatttagtggcagtctgtgtctttttttttttgagacagaatcttgctttgtcacccaggctggagtgcagtggcatgatctctgctcactgccaacttccgcctcctgggttcaggcaattctcctgcctcagcctcccaagtaactgggattacaggcacctgccaccacacctggctaatttttgtatttttagtggagatggggttttgccgtgctggccaggctggtcttgaactcctgacctcaggtaacccacctgccttggcctcccaaagtattgggattacaggcgccagccaccttgcccagcccaatctgtgtcttttttttcttttttgagacaaagtcttgctcttgtcatctaggctggagtgtggtggcatgaccttggctcactgcgcccttcgactcctgggttcaagtgattctcctgcctcagcctcccgagtagctaggattacaggcacctgccaccaggcctcgctaatttttgtatttttagtagagacggggtttcgccacgttggccaggctggtctcaaactcctgacctcaggtgatccgcccccctcggcctcccaaagtgctgggattacaggcataagccactgtgcccggcccagtctgtgtctttctaaccaagtctaccaatttacttataccagcctcacatttatgcagttgttataaactggcaacagataggtggaagaaatactgtatttgcacctgataacatgaccaagttatagcaccataatttgtaactgtcaattataattttgggattctgatttttataattttttttctattattattttacaggtaaacctgaagaggccgtgtcctttctggaatgacatcagccagtgtggaagaagggactgtgctgtcaaaccatgtcaatctgtaagaaccatgtatacatttaaaaactgttacatgttttttcattcattataactttttgttttgttttatttaagaatttttttttgaaaaaatagagatgaggtttcactatgttgcccaggttggtcttgaatttctgggctcaaacaatccatctgccttagcctcccagagtgctgggattacaggtgtgagccactgcacccagcccattacaactttttaaaggcagccaataaaactaaaataatcgtgcagtccttagtttaaatataacattcaatatttatatgttaaaaacccaaacttataaaacctattttgaattacactgccttcataataatagaattaacattttgtggttaatataatcctttgacttattagggagattgataataattcttttggcctgatatttgattttcctcttacatcttttctgaaccaagttatatatatagcataataaaatgaaattaatcgaagtataaacaaaattccccccctcttttttcgggtgtgtttttgccttggatttcctggggtgtgagtggacaaaacacctggttttacttaggaatttttggagcattaaaatttgaagtatcctactgtgaaaatagagttttaaaaatatttttgaatgacaatttattccctttttaagtacatctttttattttacttttaaaataaagttgacctttttttttgacatgatgtctcaccctgttgcccaggctggagtgcagtggcatgatctcaggtcactgcaacctccgcctcctgggttcaagcgattctcctgccccagcstcccaagtagctgggattacaggtgtgtgccaccacgcccagctaattttgtatttttagtggagatggggtttctccatgttggtccatgctggtcaggctggtctcgaactggtaacctcaggtgatctgcctgcctcagcctcccaaagtgctgggattacaggtgtgagccaccatgcccagcttcgattcctttttaatgctgaataacattccactgtatgcctatactatgttttgtttatatagtcacctgttgatggacttttgggttatttctacctttttgctattgtgaataatgctgctatgcacaaatatttatttgagtccctactttagttttttggggtatatacttagaagtggaattgctggatcatgtgttagttccgtttgtttttttctgaggatctgccatactgtcttcaacagtggctgtaccgttttacattcctaccagcaatgtrcaagagttccagtttcttcacattcttgacaatacttttactttctattcttttggataatagttatcctaataggtgtgaagtggtattgtggttttgggtggtttaattttacatatgtaaatattgttacacagacttatctagcatgtggaattaaggccaatgtcatatactatttatgggcattttaccatgagaatgagaagcatgttttttgttacattaatcctcatatagatacaacttattgaaaattaaaggattaatttatgaaacaccttgtcactattaaagcatgagcatatcattaaagtgatattaacagtgtaaacattttgtattctaagttttgcgtttgtaatttagtaatagaaaaaattagttggggacatttaccaatatcctaattatatgaattagtaaaaatgctgaaatatggtagatgcttaataaaggcgtttaattatacttgttcattaaatgagctttttattaatattagaaaatacaaatactttrcagttattgcaaagtcaaatctcatcttgagataccaattatttctgattattattgatgaagtgtagaactaggggacaccatttggaaaagaagattggagggagcagaaaccctgaaaatactgtagcataaaataatagcttattgattccatcagttgacagactgatgaatgagatgtatttcattgtaaatccaagagaaaacaaccaattttagcatttgagaaatgttaaatatatatttattgtttgatttgaatgtattgaagtgctataaaagaatcaggtggaagttatcaatttgcactgaaatattgagtcaggatccagtaattttaagcttctgcagagctgggaagaagtgaaaggcagaatgcctttcatgccaatactttgttttttttttttttttttttgtttgtgttttttgcttgtttttgagacagggtctcactctgttgcccaggctggagtgcagtggcatgatcttggctcactgcaacctctgcctcctgggcctaagcagtcctctcacctcagcctcctgagtacctgggactacaggcggactacaggcacacatcatgcccagctaattttttgtatttttggtagagacaaggtttcaccatgttgtccactggggtctttaactcctgagctcagatgatccacccgccttggcatcccaaagtgctgggattatgggcataagccgctgtacctggcagcaatacttgtttttttcttgaactgatgttatgatggagaaaagcttttttctttaaaagatcattggaaggccaggcatggtggcttatgcctataatcccatcactttgggaggccaaggcaggcagatcacttgaggtcaggagtttgaggtcagcttggccaacatggtgaaaccctgtctctactaaaaatacaaaaatgagctggacatagcagggtgccactcgggaggctgaggtacaagaatcatttgaacccaggaggcggaggttgcagtgagccaagatctgccactgcactccagcctgggcaacagagtgagaccctatctgaaaaaaaaaaaaatcattggaaggtatttatccatctaaaaatattcttagtttataaatacagataatgttagcttagcagagaaatgccacrattagatcagagttagaatgttaactggcagtattgtggggagtgtggaatagcagatgaggagatggggaagagactggtaaagtaacataaatgtgttagtccattttgcattgctatgagggaacacctgagactgggtaatttataaagaaaagaggcttatttggctcacagttctgcagggggaagaagcatggtgccagcgtctgcttggcttctggtgaggcctaaagcttacaatcatggcagaaggcaaaaagggagctgtcatatcacatggcaagagacagcaagagagcaaggaggtgccaggtatggagtgaactaatagatttgttctagataatagaacttattacttctagataatagaaccagtagattaattcattacctcagagatggcaccaagcggttcatgagagatctgtctccatgacccaaacccctaggttccaagaatctagaatatctggccatcacagaaaacaaaaacaattctactaaggaccactggagtaatagcaaaaggacacaggtgtcaatatcaagtcagcactcagtggatctcctagtggccaaatacgggacaatttgaacatcaaaagggataatggctaaatgattatttttacatctccttgctgtaatatacataatgtatgctcagcaatccatagaataatttgttcttgaatttttatttacttttaagcaatcatatgaatactacctattctgttaaaaaatccaacttcgataatttgttatatgaatttttctcataaatcacagaaatttaagatatgttttaagaagatagaataaatgccaactaaaaacatatttttttctttttcaggatgaagttcctgatggaattaaatctgcgagctacaaggtgtgtacgtatacctattgatgtgtccagtatcttaatgaaaaacttgaaaaacccatttccgttgtacctactatcccatttatctgcttccagtggtgaaaccccttgagaggtatttatgctgaatggctctctttctgtttgtttttgtttaacattttattttttatgtattttattttatttatttttttgagatggagcagtggcgtgatcttggctcactgcaacctccgcctccccggttcaagcgattcttgtctcagcctccagagtagctgggattacaggcactcaccaccatgcctggctaatttttatatttttagtagagacgggttttctccatgttggtcaggctggtctcgaattgccgacctctggtgatccgcccgtcttggcctcccaaagtgctgggattataggcgtgagccaccgcgtccggcctgtttagcattttattatagaaaatatcaaagataaataaaaatagaggaaaaaatgtatctgaaagtccatatgttattcagagttctttaattttttttttttttttttttttttttaagataaaaggtctggctctgttgtccaggctggagtgcagtggcatgatcatagctcactgtaaccttgaactcctgggctaaagtgattctctcccctcagctttccgagtagctgagagtgtaggcaaatgcctccatgcatagataattttaagaaaaaaattctgtagagatagagtcttgccatgttgcccagggtggaaactcctgaccaagtgatcctcctccctcagcctcccaaagtgctgggattacaggcatgagcctccacaccaggccagatttctttaatttttacctaatatcctttacctgttctaggatcccacccaagacaccatgttatatttagtagtcatgtgttcttaggcttctcttagccgtaacagtttcccagtctttctttgtttctgataaggtgtttttgagtagtactagtcaggtgcattttgtagactgtccgtcagtggggatttatcagattcagattcatttttttgatatatattatatatataggagttactgtgtacttactattgtgttataccaacatataatctctgcctttctcttttttcttgatgttaagattgatcactagcttcattatacattcatcttaaagctccctaatagcttttcactgaaaagttttagcagccttgatgattattacctggttgcattagccaaagtgattttttttaaaacatgagattatctgtcttctctgtttaaaatcctccttcgtgcccatttctcctgagaaaaggccaaagcccctataaagcaacaagaagtaaatagagtgaccatatgccagggtttgtctggaacagaactggcttatacctgttgtcctgacatcctttctgatttatsattttttctgagtttcttggttttaaataaaatattattaacagttgcattaaaataggttgggatggaattggtagacaaatacttttttttttttttttggggtagataggggggttctaccatgttgcccaggctggtctcgaactcctggactcaagctgttcacccacctcggcctctcaaagggttgggattacaggtgtgagccacgacactcagccaaatactttgtatttccatcttcctctgttgtcttctctcttatttgatatgtgtatgctaaatagagttctgactttaatacaaagatgaccaacaagaacgtatccttcttctgattttctagatgcaaagaaactaaatctttgtctcaagcacagtatactaggtgcttgctgaaaaataattacactcagacacaaatgactagggacagctgcctccttacagccttgggaagcacggggaaggtgttgcatactgctgcccctcttggtctcttggacttagtagccatttgtgctgtggcctgtatcatacccacaatattactaagctgccagtctgccttttgactagttaatgggaaacctgtgaaattacatggtaaataaatagaaaccgagcaatcctacatagagagaatagtcttgctgtggtagttttatcctttattgataaattgataactgtgtagttattttatggtttggtaatgctctttttattttgcaatgaatccttttggctgaaataaaaaggaaaaaggaagtgcatgttttatgaaaagtaaaatattgaatttccatttctcctgatagttcatcatgatatgtaacttgcacaaaagatcatcattcactattcctaaaggccataaaaataacactggccatatgaaaatcaaaacacagaaatctgctgataaagcctcagtgtctactttgcaacaaatttgtaaaaaatgtcagcttttaaaggtttagcaaggatggacatggtagttcatgcttacaatcccagcactttgggagggtgaggtgggaggatcacttgagcccaggagttcgagaccagcctcggcaacatggtgaaaccccgtgtctacaaaaaatacagttgtggtggcacatgcctgttctcaaaatagcaaaaccccatctctacaaaaattagccagccatgaggatgtgtgcctgtagtcccagctgcccaagtggctgaggtgggaggatcccttgagtctgggaggtcgaggctacagagagctgtgatttcaccactgtactccagcctgggagacagagtgagaccctgtctcaaaaaaaaaggggatttagcaaattgcaattattactacttattttaagaagactgtgtctaaagataacaatttaacgtgcagctgcagagagtacatttacatatcattctgtgatatgtgacttttcatttagactaaataacttttaaattaaaatttcccattattttattatgaaaaattaaaaatatagcagagttaaaggaattttcccttgaacattcttatacccgtaacctagattccaccaccttttttttttttgagacggagttttgctcttgttgtccacagtctggagtgcaatggcgcgatcttggctcactgcaacctctgcctcccgggttcaagcaattctcctgcctcagcctcccgagtagctgggattacaggcatgcgccaccatgcccagctaattttgtatttttagtagagacggggtttcaccatgttggccaagctggtctcaaacctctgacctcaagtgatccacctgtctcggcctcccagaatgctgggattacaggtgtgagccaccgtgcccggcctagattccaccattttaataaactcactttaccacatrtctgttcatctgtccatccttgtagccatccattagaacatcttatttttcggatgcatttcaaagtaaattgctggcatcagtatacctcctcctaaataagtcattagctagatggatttatgtaagtagaagtatattattaactagagtccaatatttgtttatatgtgcttttaataaaagtattaccatacaatgaaatgtgcaaatcttaagtgtgcatttgctgaatgttgacaaatgcatatacctgtgtaacctaggcttctattaagagatagaatgttagcattatcctgcaaagtttcctcatacccattccattcaaaccacactccttcttcagaggcaaccactgttttgaacattttccatcatagattctaaactaattttgctcatttttaattccatgttttcttgtacacacacagagtcaaagaatgaattaatagcttttcacttggttccagtggcagaagaactttgcacatagttaaatggtgtcattatcaactatttcaaatagaaaataatttcatttaacaaattgcttgaggctgggcacatagtggctcatgcctgtgtaatcccagtgcttttggaggccaccatgtgaggattgcttgaagcctggagttcaagaccagtctgggcaacattgtgagaccccatctctacaaataaaaactaaaaaaaaattagccaagtgtggtggtgcatgcccatagtcctagctcctcaggaggttgagacaggaggaggctgagccccaatgtccaggttacagtgacctatgattatgtcactgcactccagcttgggagacagagaaaaaaaaattgttcgatttatttcatttaatcgatagactgaaagtaaaacttttggaagttcattctgttgaaggaaaacatttgtcactattgtgaatgctagtgtaaattcagttaaagctcaaaattgaagataaaatatttgtttgtggtagtacacatataaatttttataacagcaatgttctgggtaaaaaccagtgtccttaataaatcaagaaatctatgaaacaaatggcatttgtaataaaaatatacaaataattcataattgtgtccacacaagctgtgatattttaccagttaagatagaagtggtaataagctgagtgtgtggcatgcacctgtagtcctcgctactcaggaggctgaggtgggagggttgcttgagtcctggaggtagagattgcaatgagccaagtctgtgccactgcacttaagcttgggtgacagaaccagatcctgtctcaaaaaaaaaggagtaattgttaaaattagtatgtgatttatatatatactaagttatgattgtgaaatttttgagatgaagctgatgctgaaaaaatttactttggtatggttttagtatgatagtacttactttgctgtctattatcaatcagattttataaatgttttgaggcttcgaagaactaatttgtaaaacaacccaagagcttctcagtagtattgattggtttttaataaatgaaccctctaagtttttattgcaatttgttctaaatcagtgaaaaataagtatcaatgaatggaatgcataaagaagaaacaaagtttagctgttaaggtttagcaaattgcaattatggcaaaatggctagatgtggtggctcatgcctgtaatcccagcacttttggaggccaaggcagacagactgcttgagaccaggagttcaagaccagcctgggcaacatggtgaaaccctgtatctaaaaaaatttaaaaaattagccatacatggtagtgtgcacctgtagtcctagctactcaggagactgagaggggaagattgcttgagcctgggaggttgaggctggagtgagctgtggtcatgccattgcactccagcctgggcgacagagcgagaccctttctcaaagaaaaaaaaaaatcattataacaaagcttgtaaacaaaggcctttaaatttatacctacaaaaagtagagagaaatcaaacacattaaatgaggaaagtccaaatggtgtttaatatgattcagaaattgtattctgaaatgttataaatgtgtttgggagtatctccatttgtggcaagaatatcttcttgatagaactctgctttgaattggatacatttatattctgatctgagatgtaatgaaattgaggattacaatttcatagtatctaagtttgaccaaattttttttgtttgtttgttttttgtttttttttttttttttggtcagagacagggtctgtctctgttgcccaggctggaatgcagtggtaagattatatagttcactgtaacctcgaactcctgggctcaagcaatcctgccacctcaacttcctgagtagctagtattataggcacatgccaccatgtccagctaattaaaatttttttttgtagagatggggtcttgctgtattacccaggctggtctttaattccaggcctcaagcaaactttccactttggccttccaaagtgctgggatttcaggcatgagccaccacacccaggctttaaatttgtcaaaacatttaaaataatgaaaacatagagacaacttatttgatgttttgtcttaaaatatttattgtagaaatgtactttaggggcaaaagaatagaacttgtgaaaatatttgggctaaagtatttccacatatttacctaaagagagaatgttttttctttttttttgagacggagtcttactctgtcgcccaggctggagcgcagtggcgtgatctcggctcactgcaagctctgcctcctgggttcactccattctcctgcctcagcctcccgagtagctgggactacaggcgcctgccaccacgccctgctaattttttgtatttttagtagagacagggtttcaccatgttggccagcctggtctcaaactcctgacttcaggtgatccacctgcctcgggctcccacagtgccgggattataggcgtgagccaccgtacctggcctgattatgggcaattttatgaaaaattaaaagcaataagaacatattggaaaaataaaaaaaataaaaagagcttcagataacttctaaattttaaacaagttttaaaaatgcaataagttattatctatttattccctttttcattttagtattctgaagaagccaataatctcattgaagaatgtgaacaagctgaacgacttggagcagtggatgaatctctgaggtttgattttatttttcagcagtatttcatgtttctttatgttacatattaacttaaaaataataatgttattttttttctttgtttgaagtgaggaaacacagaaggctgttcttcagtggaccaagcatgatgattcttcagataacttctgtgaagctgatggtataatatttttgatagtatgcattgtgtttaaaattatacctaagaaaaaaaaagtttttaattattttaatctgggcatggtggtgtgcctgtagtcccagcttatctggaggctgaggcaggagaatcactggagcccaggtatttgaatccagactgggcaacatagtaagacccatctcagaaaaaagttattaaagaaaaaaactcagtttctaacggtttggcggttcttcaaaaacctaaacgtagaattaccatatgacataacagttccttttctaggtatatactcaaaaaaattaaagacagggactcaaacagatggcaaagcaatgttcattatagccaaaaggtggtaacaacccaattgtccagtactgtttgaatggataaacaaaatgtggtatataaaacacacaatggaatactattcagccagaaaaaggaatgaagttctggtacatactacaacacggatggatcttgacaacatgctaagtgaaataggtcaggcaccaaaggacaagtataaatgatttcacttatatgaaatgtaaacaatgggcaaattcatggagacagaaagtagattaaagattatcagaggttggggtgggtaggcgttattgctaaaaggttacagagtttctgtttgaggtgctggaaaagttctggcaacagatagtggtgatggtttcacaacactgtgaatataatgaatcccactgaattgtatacttaaatgtggttaaactgtaaattttattatatcaattttattacagttaaaaaaactcagtttctagaaaaaatgtacctcttaagttttgcagttctatgtagcttgtggtttatataattttgtatatacattttgtataaatagctaaaatttagggattacaaaaatctgcttcagttacattgctgttggattgttatgtatattccttaatgatggtccgtgttgcttttggagaagtgaatattgaaccgttagtcgagtctgtgatgtctgaagttaagccagagtgctgctgctgttaaaagctaggagccccagattcattaaaactctgatcgtggcacagtggttcatgcctgtaatcccagctactcaggaggctgaggcaggagaatcacttgaacccaggaggcagaggttgcagtgagctgagattgtgccattgcactccaacctggtgacagagcgagactccgtctcaaaaaaacaaaagaccaaaaaaacaactctgatcaagatgtatagattttccaattcttcctttttctagtatttcctttttctaagttgaattgttagcctcttaattcactaaaaaaaataaatcaaattgagtcttggtattcttctgtggctcttttctagtggactaacgctctttcaaaaattagtgaaaacgggcctggcttgttggcttatgcctataatcccagcactttgggaggccaaggagggaagattgctgagcctagcctgggcaacatggcaaaactctgtctctacaaacaatacaaaaattagccaggcctggtggtgtgtgccagtagtcccagctactcggggagtgggaggattgcttgatccagggggttgaggctggagtgagctctgattgcaccactgtactccaagcctaggacagagtgagaccctttctcaaaacaacacaacaaaaaattagtgaaaacagtgatataaattcttttaattataagccaaagatgcagcctacaatctccataaaagagaaagtatttttaattttgtggcttctttttggggaaaattgctttccttaatggaaaccgtagccatgttttggtatatacttagttataattccttatttccaattctaaaatctggaaactgaaaactgaacatttctccccctgcgtttagcagaggctcatttagtgtgagtatatgtttcactgtagaaatatttacgtgtttgaataaagattgctcccccaggtccagctggagtaatatgcgatatatgttgcatgtactgtattacctttgtaaaatctggaaagttcattccagccgagacacgcatggtcccaggcatgttggatgaggggtatagacctatatcaagatttggactagtgaaggaaggggataagatgttctcccaactcccttattttgccatcttttctacaaggattttttttttaccttaaatattgttgtgagataaaactaaatttatagtatgcagctatamttttttttagtcctccactgttagaaaaaggatggtaatattttaaccttaattaacatccttttgtgactacaatgtgcagcaccaggtgagaatcaatgattcatttcttatatggtagagtttggtgaatcacttgcccatttgtattagtgtcttctgttaaaaaaagctgaatattttaaagaaagctttagcaggaataaataatggatgtaaatggtacgtgaaatatagaaagtatttttaaaatcctaattggaaatttgagcttttgtcaaaaacaggttctattcagtgatagaaaacagcatatcatataggttttgcagaacgcatgttttctgcttctagggctggatattggcattttcctataagggccaaatgggctcttaaatgtcttttcttagattttacaaaacatgtttgactagttttctatgaaaaacttcaggttctattcagtgataggaaccagcgcatcataaaaattcttggcacaaatataattatagtaatatttaatataattatagtattacttcaaatataattgtataattataattataattatagtataattataagatttgtaatataataatatagtaatatttattttttataagcttgaagaagaatgaagtatttataataagtagaattatgaggcaacaaatgtttatctctaggtagaatatttaaaaatttaatcatttcttggtggttagttttctcaaagtcctggatactgaccgttgtttatgtattttattttatttcatttttatttttattttttttcygaggcagagtttcattctcgttgcccaggctggagtgcaatggtgtgatctcagctcactgtaacctctgtctcccgggttcaagcgattctcctgcctcagcctcccgagtagctgggattacaggcatgcatcaccatgcccggctaattttgtatttttagtagagatggggtttctccatgttggtcaggctggtctcgaactcctgacttcatgtgatccacccgcctcagcctcccaaagttctgggattacaggcgtgagccaccatgcctggcctgctgtttatatattttaaacatcagggtttaaaaaatgaatttattataatttatatgtggcacttgcctttagtattaattgaaatgaacagttatccattcctgaactagatgattccatgctaatttgttttttaagtccttatattttgtttttctagttattttaattgccacttctgcattgaactctgctattttaagatgccgtcattgtactgcttctagaagcaaatttccccctaatttatgcttctaatatactgtgaattggagtaaaaaataaccaagcttagggtttttttttgtttttgtggtttttttttaataataaaaataggtatagttgagagcttgatggactctaagcacttttgtgctcatatttttgttattgactttggttgcattgagaccgtttttgtccactttttaattctttgttggctcatactgttaagctttatatatgaataaagtattattatagtaccaaataatttcccaaagccactggaggactatggcccatctttttttgagacacagtctcactgtgttgcccaggctggagtgccgtggtgcaatcacggctcactgcagcctggacctcctgggctcaagtgactttcccacctcagcctcctgggtagctgggaccacaggcacgtgccatgatgcctggctaatttttgtattttttattgatgcctggtgtttcaccaggttgcctgtgaattttagaatcactcctgggctcaagcagtctgcccccaggcctccgagaatgctgggattacaggcatgaaccatcgtgcccaccctgggaccgaccatcttttttgttttgaagttataacacattataaatgataaataagtaacagggtctggattctagcctgggtgttctggctccagagcccatgctctggctgttctgtgatgttggatgtttaggttgcttccaattttcccttttataaataatgttgacacagaatcatgctgcattgtaacttttgcttttggccagattggatctgctggtggtcatctaagaagaaagtatttggtaacacgcagtgtacaatactaacactccttcatttactgtagttattgatgaactgctgtggttaatgtggagggaaatgtatgttatattctttgtctgaatagcttatgataattgaattaccatgtttctttgattctaaaattcacgtattcctatttttacaattcctaaatcataatgtttttgtagccagtgtgtacaattaatgtggctgtgtgtgtttctctctcttttccttcctttcttttctgagacggagtctcgctctgtcacccaagctggagcacagtggcgcaatctcggctcactgcaacctccgcctcccgggttcaagtgattctcctgttgcagcctctcgagtagctgggactacaggcgtgcaccaccacgcccggctaatttttgtatttttagtagagacagggtttcactatgttggccaggctggattcgaactcctgacctcaagtgatccgcccaccttggcctcccaaagtgctgggattacaggtgtgaggcaccacacccggcctccttcctttgtttctcctgaaaagttgttttaaaattcctgacacattgttatatttgtggtgcgttagaatcaatggaatacagtcttgtgtagtagctttttaaggtaactgaggataagaaaggtttaataagacattttattttacagacattcagtcccctgaagctgaatatgtagatttgcttcttaatcctgagcgctacactggttacaagggaccagatgcytggaaaatatggaatgtcatctacgaagaaaactgttttaagtatgtgtcattttcatttagaaaaattcctataagatgtggtgatttctctttatraacaaaatcataatgatttaaaattaaaaatcaaattcactttgttaaaagatgtgtttgtacaaggaaacatgactattcattaatccagtttccttctggggaaatatatagacgtgagtttccacaratttttcctttagacctttatgggagtattgtaggcccttgacaaatgttccttgagtcgattataggatctcattttatagttaaggtaacctagagctggagaggtttgcttcatttcccaagatcacacagtggcagtgtagagaaaagaatatacaactcttaattctctttttggtgctctgtacacccttgtctgtggctttaattattttacagttaaattgatttcagagaacaattataataggtatcatttttgagcactcactgtattctaggcattgtggtaagcatgttatatacattttcttcttcagtccttgcaataaccctgtgttgcagtcatcactgtattatagacagagaaactgagacttagagaggttaaatgatttgttcagtgtcaaagatctagtaagtgaaagagcccgctttgtacggggtaaccattaggctggaggcagttgctgatcactgggtatctgagaaatgcttcaggttactcacacgtaagtcttgaggtgctaaactttgtactcactggttttgggatcaatgtatgtgcgagcacattatgctgtcttagagatggagagagttctgggaaagtctttggagttcccaaatatggggataatattatatatttcactttttataagtcaaatataagtatgagatcagtaattgtgcttacaccaataaaatgtcagactgtggtgtttttttttttgacttgaagaatttctccagtttggaaagtagagagtttttattaattacttatttctgccatgtattttatttaaattatcttgactattattagaaatgtttgatttactgacttaaagatttactttaaaggttttttttttttttttttgagatgaagtctcactctgttgcccaggctgcagtgacgtcatctctgcttaccgcaacctctgcctcccaggttcaagcgattctcctgcctcagcctcctgagtagctgggactacaggcacacgccaccacacccggctcatttttgtatttttagtggagacggggtttcaccatgttgtccaggctgttcttgaactcctgacctcaggtgatccacccacctcggcctcccaaagtgctgggattacaggggtgagccaccatgcccaaagtgctgggattacaggcatgagccaccacgcccggccctgttgttgttatttttagtgtgaattaagaatgggaggccaaggcgggcggatcacgaggtcaggagatcgagaccatcctcactaacgcggtgaaaccccgtctctactaaaaatacaaaaaattagccgggcgtagtggtgggcacctgtagtcccagctactcgagaggctgaggcaggagaatggcgtgaacccgggaggcggagcttgcagtgagcccagattgcaccactgcactccagcctgggtgaaagagtgagactccgtctcaaaaaaaaagaatgactctgtctcaaagaaaaataataaaagaatccatgaagcatttgttagatttgtattacttttgtagtcattttcttactaatttgtgtcctgattcccataatttctaacaatataaacaatgtataaagggctaagttaattatattgtgtattttaaaatacagcttacatattctgttctcaaaatgtctccagttttgcaaatttttaaaatagatgttaaaacaatccctatagtttactattaatactaacgcatatttattttgggatttaaaagcactttaatgacatagtaactctccagaaaatttctgttttttcctactgaacaaacaacttttatttaaattgtaacaaacttagctacagggcaaattgatgtgtctaaagattacctaagtggaaaataatctacactattttttttccatttttaaattttaatgcttatattgaatattttttgcttatttgtctttcatttaggggtacactttgtgccatacacacacacatatacatagatatgtatatataatatatataaaaacatagtagtgactccgagagaagagcttggctgatattttctcttcttttgtttgaagaagtgattaggaaatggcctgctggccgccacaatgggagaagatcaggaactattatcactacaacaaatagccaccctcccttaaagcaattagaggaaactaagtgttttataatctcaataaaacaatttgattttggatattaagcagttttctgagataatatcacttaaatataacatgattggtaacatatttgtgttgmtatttttaattctttttacttctaggccacagacaattaaaagacctttaaatcctttggcttctggtcaaggtaaattacttrtttgcgttgttatattatttctcagccagggaactttaattcaaaggaaggggaaggcaagataaatgacagtaacagttgaagtcatataatccacagtcctgtttccatagagttatgcctcacgcttgcagagattggtgcttaaattatttgtacttcagtaaaaagtattttttttttttttttgagatggagtctcgctctgtcacccaggctggagtgcagtggcgtgactttggctcactgcaaacttcgcctcccgggttcacgccattctcctgccgcagcctcctcagtagctgggactacaggcgcccgccacracgcccagcaaatttttttgtatttttagtagagatgaggtttcaccgtgttagccaggatggtctcgatctcctgacctcatgatccacccgcctcggcctccgaaagtgctgggatttcaggtgtgagccactgcccctggccagtaaaaagtatttttataatgaagttcctggtattagattatcaaaaaataaagattaggatatatatttattctatatatttttgcagacatagtaaaatgtcagttttttaatcccacagataaataaatatcccaaactctcaaattttttctaaaacttgaaattattgcaaatattgggcatctgatttcaactttacatgtctttatatcttaataacatttttaatattctgttttcactcaaggtctggctcaaatgctgctttttccataaaactttccctggtccttgtaaccagaagtatttctccctcctcatgaagtaatctgatgcatgcgtttgtttttacttgttttcctcttacggcctttcccactgtgtagcattattttattattatttatgtatctatcgatctaccctagtactctgccatatgggtagcatttatctgttttatctctctatatagagcctgacacataatagatggagtagtttgttagatacatgatcagtgaaaattgctctcttcatttaatggtcttgtctacaatagtgaaagccagttgttctttcagcaaatgattatccgccatttactacctgctaggcactgtgtagatgccagaggggatgtaaaattaaaatttacaaaaaccctaccccatctgtaatatgaagaatggtttgttgaataagccatttcagtgtatgagttcagactttttctttagaaattatgtatccttattctcttcaaatatgtgcttactgattaaaatctttaatgtgcttttagcaaaagtgtaaggttttcattttaaaaatttatttgaaaagatgctgatctcaaataataaatataaatttcctcctagaaggggatgagattgcatcattccctaaattctggcagatttctctttcttagattaggaatgaaaaatctttaaataaggcttttgagtttatacagagtcacatgtggtgactcagtggaagccattgatttaatatcagatgaaatgcaaattaatagaaaagaggtgatcattatgatctcacattatgatttgataaagtaattaaccacgtcacttaccataaagatacataggaacaatttaaatgtttatcattagggaactggttaaatgacttatggtatagtcacatagaaaatagccattgtaaatattgctgtaaatttttattcatttaaatcaaaagtgaccaataacacagtgaggaaaatcaggtatcaaaacaatatgtataataaatttataatatatctataaactaaaaagatattcactaaaatgtaaatagtatttatctttgagctggggaattatgaataattttttattttgtcttttttttaaaaacatatatttgcaatgattatatatttctttaataaaccgatggcattaaaaaaagtgggcaaaatttttgaagacaaattttcagtagtaaataagcagctgcacacaaattactgtattatgtataatttgaatcttataaatagtctatgaaaatattcccgactaaggttaaatattataaggccaggctggaggtttcaaagcaataataataatatttaacagaaactacattatagctttaggataaataaatgtggaaaagtctctgtcagccaagtaaacgtaggtccttaagatattgaagagtactctcaggtgatggattagttttttctctcctgtcagggtatattaaatctcacatgagctgaacctctttatgtacactcatggagataacaccatttagtcaaatcaggcataattcatatcactaccagatagagttgcagtcacgaatgtctcactttcagattttacttgtgtgaatgaactgttggactaaaactaaccattattaaagtcttatttttatgaaagtgtagcattataaaaggggcactggaaggaatttattttaataaacattttgttttgcttttcagggacaagtgaaggtaagtataatttattatatattacatatatgaatttgtttatacattcagatgtttattatggcaaagtttatttttttcttctcacctctaaaaatcagaagaacttaagttttacttatttatctgaaagtctggaggtactagcacagattaagggaaagtgactttgtgtctgggttcaggcattagaaacagtgtgcctcagcctctgatcattcatttgcacattttacctctctgaatgtggaagcatgtccactccccgtctcccccattgcctcaggccagggaaatgtcctctctcttttactggttgaactctaggatctgctgggtttcatgtaggaaggttctgggcatgatgagtattgatttcagagctggcttctaaggttgatgctgacttgttggatgtaggtgtcattgccaagtctaactaatgctaacagtttcagcatacattaggtttactttgtgtttttgctttaagggtgaaaatgaaatgacatttgttattcttaagaccatatgcttaacaatatgaaaagacttaatggtgcttagctttagtctatctaggtgaaattgctaaaatgtgaagtatcacttttctttccctcaaaatcctctattttctgaacataattcttatgaattgcttttgcattatgtctaaataacagaatactaaagtctgataacaatgctattttattattgtgctttatattatattaactgtagcagctaaataaaatgctgactcagaactgtttggaagagaaattgtttagcagtgagattatttttccaaagatgcctcatatttgctactggtacatgtgattctatgattttcagtttcaagtaaccttattttaccttgagtattaacctagttctatgctatattgttagccacattagaggaggctactatgatttttcaattctatttgaagaccttattatcagaaaaatagatcgttaacctgtgggagccatccttagagaaactgtcttattataagtattgattttggccaaatatcaaagggttattcctgagagctatcatattaagtgattgtttagaccacagtcaggtcaacttgagaacaggtacttcaggattataatattgaactgatttcttggctgggcgtggtggcttatgcctgtaatcccagtactttggaaggccagggctggctggtcacttgaggccaggagtttgagaccagcctggcyaacctggtgaaaccctgtctctactaaaaatagaaaaattagctgggcgtggtggtgcacacctgtgatcccagctgtgtgggaggctgagatgggaggatcacttgagcttgggaggcggaggttgcagtgagctgagatggagccactgccctccagcctgggtaacagagcaagactgtcttttttctttttttttttttttaaaaaggacacacagacacacacacacacacacaaacactgaactgaaaatttcactggaagcctaggtcctaagcagtattatcccctaactccctaattcatgatcaaaaacttgaaaaaaagaaccttgaaaatttttataaggaaataagttccttataatcccaccatccccaaataattaataataataactctgtgccaggcacttttctaagcaatttacaaatatgattttatttaattctttcaccaatcctaggggtattattcctgtctccatgttataggtgaagagaggttcagcaacttgactaaaataatatgatttgtaagtagcagagttaagatttaaatcaggcagtttgactccaggaaccatacccttagttactaccagatacgcttctctgctaacattttgatatttatgttttctatatataagtagttttgtccaacacttgtcagcattaaagatgatcatatttttatcttacttgataggtagagtcatgtatcttttgttttcatttgcattttttattgcccgtaagaccaaacaatttttgtctgttattaccatatgtattttttcctttgtgaatttttaaattcatattatttacctcttttttaagggggcactttagcatttttatttagtttatgagctttttatatatttaggatctaatccctttgacatatttgcaacatacattttactgagtttgttgtttgcattttgcttttgtttatgaagtgttctgacaaatagatgttttgagtttttatatattccagtttattgcttattccctttgccattccttccattatttttatgcttgtttggttcatttttaacattactgtaagcaactttagtagaaaacactgtacagtgtttatcatctctgtagcaaatgcatacatgaatctttacagagttgtatgattatttcttatgccttttgtataatatttcaagtaaacatttttatgtattgccatgttctacattcttgctattttcatagttgtatgttattttaccatgttcactagttagatagtgttctatcatgttaatttaggcattatcgtatttgtagaattactaggcattaaatatattgacaataatcttattaggtcataagaatataagtgatacttggtgtttataacattttcctgaattgctcttttgaaatagtgaatggcatgtaatattatcagctaaatacaaatagtacccctccaatactgtcttatcattttaatttttttctagtttaaaaagcatgtaatgaatccttagttttcatggcatgaattgttatcaaggctaggtattttcccattcttgactgatttactatttaaattctgtattttgacctcctgtaaaacactttaaccagaacgttatgagrctgggtcaacctaaggcaatgctaaagcctttyaaagaccaagcagcaggctggtacttaactgaatccataacctttcttcttcctttcragaaattgcaattaagacttggaccgttaggttaaataatctttacattgttgtttggcacaaatttgctataatgctttaaaacttttgaaaaacttgtattttggcatttttctattcttatgacttatttttcttttgatttcagaraacactttttacagttggctagaaggtaattagaaactttaaaataaatttcaatgatgrtttttttctcatgagattaattttatgtctacaagattcacatatgaaattttatttctaagtcactgctttktcttaggtctctgtgtagaaaaaagagcattctacagacttatatctggcctacatgcaagcattaatgtgcatttgagtgcaagatatcttttacaaggtatgtgacatttacttttattcagtctaccactcttaattttagatattcttaaaattttcctggcatttacctgaatgggaaaagattgacctgattgaatattaggcagtaaaaattcactcttaaatggtagtaatcagaaaggtgggaactgtagatacaattgaacagtttaacatactcttagctctcttcaccttcttttaagaagctgctcaaaattgtccatatcactttggaaatattcttgttttcttgtgggaatttaaatagttcctaacagcacagtttgctatttgatagatattgttgtatcagaacctttttatttgtgtgctcgtatcaggcctggagtttaaatgggtaaaagcctttcctgctgctgttgatgccttaatactgttgaaaatgagactgtggttgattttcatcagtaccatatttcttctggaattaaagtatcacactctgagaaacaaaatatagaaacttccattttattcattgattgattgcttgattgattgagacagggtctcactctattgcccactctagtgtgcgatggccaaaactggggcttagcctgggagggctcttggctttgcccaggaaaaagtttgaacctctcctcatgaaggagagctgtcccataggcagtgtgcccagagtagcagcttggaggcagttctgcagccatatttatagtccactttttattatatgcaaattatgaggcagattatgcagaaatttctaggaaaagggtagtaacttctgggtcattgctatggaaaggggtggtaacttctgcatgttgccatgggaatgagaaactgacatggcaccctggtgggtgtgcctcatggaaagctgcttcagccccctccctgttttagctagttttcaatttggtccagtgtcctgagtcccacctcctgagccaagtcctaccttctacctcatgactacaggagcatgccaccatgtccagctaatttttcacaatattttttgtagagacaagatttggccatgttgcccaggctggtcttgaactcctgagctcaagtgatttgcccatcttggcctcccagagtactgggattatagccgtgagctactgtgcctagccgtaactttgattttaaatggcggtttaaactcattagtaattttactgtttttttttttttttttttgagacagagtcttgttctgtcacccaggctggagtgcagtggtgtgatcttggctcactgtgacctctgcctcctgggttcaagtgattctcctgcctcagcctcctgagtagctgggaccacaggtgcatgccaccacacccagctaattttttgtatttttagtagagacggggtttcaccatgttggccaggctggtctcgaattcctgacctcaggtgatccacccgccttggcctcccaaagtgctgggattacaggcttcagccactgcacctggcctaaactcattagtaattttagatcatcattttcaaattgtgtgtttaggttttatgaatatgtttatattcagaagtttgactattattttttttcatctttaaaaaaggaaattttattattttccatcacatgaatgaacttggaggacattatatttgtcaaaatgagccagacacaaagattattatttcatgatttcacttacaaagggattctaaaaaacttaatcttattgaagtagagagtaaagtggtggccaccagacaccaaggtatttaggagacaggagggtttgaaaagatgttgatcaaaaaatacataattatagttaatagaagttcaagagatatttttgtacagcgtagtgactatagatcaaaataatgtatttgtagttttgaaaaatgctgacaatgtcacttgctcttgccacagaaatgttaactatgtggcgtaattacctagaattaagcatttaacaatgtatatatacttccaaacattatgttttacaaaataaatatacatttattgattacagatggtaatggtatgaaagccactgaaagggcaggcgttgcttatggtcttatgactggccactttgtgaacacaataaacaagtttgcattaaaaaaacccagaaaatggtttaatctaaaagttgccatgatcttcagaatttttccagagaaaatgaccaagaagttgactacagttaggtgactaagaatataagctgtagacaccttcacccactaaaaaaaaaaatcacataaaataagagtgagaaattcctctgagttgtaatatcaatatggaaaagaaatattattccagatttcaaatccacagagatcattttattattttgcagcctttaacattcacacttaaaaataaaagattctacatggaaacatgtgctgtaagtgtatcatagaacattaaatttaaaattattcacttaccattaactctcctaatactttaatttctatgatatattttctagcaaattagatagatgtcacactttgtgtaagaatttttttttttttgagacagagtcttgctctgtcgcccaggctggagtgcagtggtgcaatcttggctcactacaacatctgcctccaggattcaagcaattctcctgcctcagcctcctgagtaactgggattacaggcatgtgccaccacgcccggctgatttttgtatttttagtagaggtggggtttcaccatgttggtaaggctggtctcaaactcctgacctcgtgatccacctgcctcggcctcccaaagtgctgggattacagttgtgagccaccacgcctggcctgtgtaagaatttaataagattttccttttacaaacagagaaaaacaatgctaagttacttaatcctctcacctgtggacaggtttgccttttatcttaactgatttgaaagttatattgataagcaaactctctagttaaaaccaatttttgartgcattaaataaataccaactttctcatcaaaacctacaaagtaccatgtaaaatgacatggcatgaagacaacagtgagaaaactgtagccatcacatagaaaaagaaggagaagggctgtgatgaatacacagttagaagacacataataggacaaacaaaactaaagataactaggaaataaacagaatttctcttaaaattcagcaagatttagctttgcagcatggaaaaatgttatctccacatgaagaatcaatcttatttcttcactattgatattttccttctctgacttgaacttacaaactaactgtagcaggaatatttatggcttatcatggagcatccgttacacagcaagtactgtgtgtttgtttgctacatttatatataaaaaacatcctcatgacttctgaagcatccctagttcttacctgaacaaattggctcaataaacatataaatttacttatgtcaattataatgagaataaaataagtaaaaaaaaatacaggcttatgtagaattctttaattaaaagaacaaatggaatgtcctaattaaatgaaatgtaatacacaattttggaaatacatctaaaaattgttttgtgtgcactactatattttataaaaatcattcttattagtcatgaccagctcacataatacctcataaactataaaagaaaaaaattataagagacaagaaaattataagtctagcatgagaaccaggcaaagaaaaacagaaaatgttcatggggagattctgaatcataagtcagaagattttacagtaatgaatttaataaaaagcagagtatagatttgctttcagcatttttgaggttttcagttttctagtaaatttgtcaccttattaagatatttgttttgttccaatattgctctattcttctgaaaacaggtataaactcatactcacccaaacacacttactctataattttcttgcacctaaggtctatttttagagtaatatatgtgcatagctaactctatgtaaatcagaactaaaattctgtatgtttgcaggcagagagaccacatgttcaaagaaaaatacataacaaatttttttaaatgtttaagcagaactcagaattttaagactcaggattttatttatatttataaataatttttattatacccataaaaatgaccctataatcaatagcaacttaattgtacattttaaagtaactaaaagtgtagagttgatagaaatttcatttgccctgatgtgattaatacataaattatatgcctgtatcaaaagatgccatatatggcatcaatataagcagatactatgcacctgcaaaaattaagaatgatttttattattaataagacttgctttctcagtaaaacattgaatttgttttaaggatgggttctagaaaataaaatattaatataaaactattaaaggctaaattgtgaaaaaccattttcttggttgttattatataacttaaaatgcaaaatgaaattaacttctataggcatgaataacctaatataattaaagtaaaaattgtcaaattcagtttttaatatttaattcttcttccttcttagagacctggttagaaaagaaatggggacacaacattacagaatttcaacagcgatttgatggaattttgactgaaggagaaggtccaagaaggcttaagaacttgtattttctctacttaatagaactaagggctttatccaaagtgttaccattcttcgagcgcccagattttcaactctttactggaaataaaattcaggatgaggaaaacaaaatgttacttctggaaatacttcatgaaatcaagtaaattatatattaaactttatacattaatagaagagtgacaattaatgtacaagataaatttttttttttttgagacaggctctccctctgttgcccaggctggagtgcagtggcacggtcatggctcactgcagccttgatttcctgggctcaagcagtcctcccatctcagcccaagaagctgggactatatgtgcaaaccaccacaccgggctaatttttgtattttttgtagagatggggttttgccatgttgtccaggctggtctcgaactcctgggcttaagtgattgatccacccaccttggcctcccaaagtgctgggattacaggtgcaggccactgtgctctgcctgaaatttttaatattcatttagagaaaggaaaactatttagaacataattaaaagttaattttgcttgtaggtcttttcagattgaattttgcttttgtttttattttgatttgggtactgagaggcacacatttttagttttaagagccattcttttagtatttgataatgtattattttcatgtttatttgaacaaattggatttggggtcaaatttctgtattatgcagttagaatcaagatttgaggtttgaggataagaatttgatttggggcatcggagtgttggttttactatgttttctcctctttatttatcatgaccagtaaaatgttgtattagcaggacttttaatatttataacacatgaaaatgaatattctctgttttaaaacgcaggtcatttcctttgcattttgatgagaattcattttttgctggggataaaaaagaagcacacaaactaaaggtaattactttatacttaactgttagatacaaactgattaacacttatgcagatatgaatatatagtactcatagaagtagagagtaggccatagaagtagagagtaggccaggggcagtggctcaggcctgtaattccagcactttgggaggctgaggtgggaggattgcttgagccctggagttcaagaccagcttgggcaacatcgtgtgaaaccctgtctttaattaaaaaaaaaaaaaaaaaaagtagagagtagaatgatggttaccacaggctgggggtggggagtggatggggaaaacggagatgttgatccatgggtacaaagtttcagttagggagaataagatttagtgatctactgcacagaatggtaactatggtaataatgcattatatattgcaaaattgccaaaagtgtagattttaaggtttccactatacaaaaaatggttaagtatgtgaggtgatggatttgttaattagcctgatttaatcacttcatattgtaaatatacattaaaacatcacattgtatccataaacatatacaatttttgtcaattaaaacataaacacatgtatatatacttaacagtatatcttgatatacatcttgaaattaagaaaaaatcagagtcataatctttcttttcctcaaaaaaatcaagtccaaaggcaggtgccacttaaagtctattttgcattatattcaaagtaacactgatatctgtatattgccgtacactttctagatgcctttcacattgatgatctcatataataaatagaggtaataaaggaaatggatccaatgcatgagtagcgtattagtctatcttttgctgaagagaattctgaagatgatattgtttaattaaaagatcttcattagtgggagaaggcacagtgtgatgttttgtcattcatctttttttattattattgagaagggatctcactctgtcacccaggctggagtgcagtgatacaatcacggctcattgctaccttgaaattctgtgctcaagcgatcctcccacctcagctttctgagtagcttgagtagctgggaccacaggcacatatcaccatgcctgtctaactttttttttttttttttttttggtagaaacagggttttgctatgttgcccaggctggtctcaaactcctgggctcaagcggtcctcccacctcagccttccaaagtgctgggattacaggcgtgagccattgcaccccctgccgttcatcttattcactgggaattaaagacagttatgaataccagcgtgcagctggggaaagaacagattccataccccacggaatgcggtctggtcattgccttgcctcttaatagggtctgacctcaggcaagaccatctctgagtatgtatttgcctcataatactataaatatcaaacattaccaggaagatttattacacactcattatgtgcacagcacgattttttgtcattaaaaggaaasagagcttccaccctcaagggatttccagagggggtcaagtaaaattatatttctcttctctcttacaaagttccactggtaagtaaaggcaggtggacctccatactactgggtttgatctgattttatatatacatacatatatatacacacacacatgaaattatatatatgtacatatgaaatcatatatatatatcacagaatctttgtagagtaatattattgagtagtttttttttttttaagtaggtttaaaattagtacctcttgcctggatgtcatctggtcatagaaaaatagtaaaaataaagttagtacctcttactgaacaggtactgaaacacaagatagagaatattgttaagatatggtaacaattaacaataatttgggctttgtcttaataaagatactagatatagatagatactagatatggtagatatgtataggtagatttctatacaaatatgtctgatttcatacatattgtatatatatttttgtttttttaagagataaagtcttattttatcaccagagttgaagtgcagaggcataatcatagctcactgcagcctggaactcctgggttcaagccatcttcccacctcagcctcctgagtagctaggactacaggctggcaccactatgccctgctaacttttaaaatttttttgttgagttggggtctcactatgttgcccaggctggtcttgaattcttggcctcaagcaatctgcctgtcttggcctccgaaaagtgctgggagtacaggtgtgagccaccaccatacccagcctgatttcatcaaaatatttacaaaaatcttcctctgcttttcattctttctttctgtaatgaaagaacctgattttatgcactcagtttttttgctgttagataatacttattcttgacttcccatctacctcctacttgaagcattcttgctacaaatacatacctcagtgcttatataatctgcctaaacagcttccaggaactagaaagtgagggggaagatgctgtaataagacttctttttttcctactattttcaatatgttcctttttttttttagtttacttgctgctttattggaaagtgttctggcatcagctctttttaaatcatgcagattagaaagatttctcacaatgttttaatttgatcaaaactcggaaacactcacctttaatgtcctatgaagtttaggtagagagtcttgatgtaacagaatttttctgaatcttttacaggaaagatgtaaaaaacaaaacatgctactatcaaagatttacttttttaaaaagcagtttctggtaaacatcgatttaaacagtcatatttacaaattaattttaraaatctcatcttgtttccttagtaccctatcaatgtatggttagaaatagaggacttgtatgaaggagaattatttagcattcaattcaaatagaatacgatctcatttgaagacttgtaaagtatttgagaatttgggcaagaattggtcagttggtttcactgaatataaatcacagcatgcttgatcattctattgactggctgtaatttaaagtgatgacctaaaactgtatgtctaaacaaggaaaatctgtaagtgatttaggtactggttattttaaggaccatacctttttctaacctgagataattaggggatatactcaggttattgtacataattgttatttgttaagtcacaaggattttctcctgtgaaatccttactaatttttactaatttgatctagtaaatttctagcctattaatttggtcctagcatattaagttcacttaagcagaagatgcatgctatttgatgtgcttggttttaattttacaatgtttatttggctattgtaagcagccatgcctgctctctgtacatgtcatacaaagacttactcaagagctgtcacattcaagtatttgaattaacgtagaagcaaacattgaaattagcgtctacaaaagcaagcacagtcttttagaacagaggcttccaactctcacaagtatgrgagtctcttatactcaggaactttcaaggcctcttctcatgacagagtatttttagtatctgttgattttgaaaatatgattgccaaaaagccaccatgcatttagtaacactttwaaagtaaaagttgtgttttattgatcataacatttctatccatttggaaatttatagtgcatatatgtgagctatttattctgtggtatatagtcttgtctctatgtggaktctgtggatcctcataataaccattaagtctkctggaagtcaacagctcataggatgggaacatgttctttagggtaactttcttactctgttattattgttaaaagtgtgatttttctttaagttttggtcaatgctctagtttaaaggcaacctaaaatcagatcacagaatctttgtagagtaatattaccggttagttttaagtaggtttaaaattagtacctgttgcttggatgtcatgtggtcataaaaataaaaaaaaaatagtacctcttactgtacaggtactgaaaccaagatagagaatattattaagatatggtaacaatgaacaatttgggctttgtcttaattaataaagatattacatcttagatcctattaaaactttctttcatgttacagctgtttgaaagtcacaaactgaataaagcatgttgggaaagtctgtctccagagcaaattgaggtttcctttgaatagtgggttccaatcattgatttattcctattttagatttgtggtcctgccttcatctggttgagcctagtgtgtggtttatcacattagaataagagaaatactgtgtgctccctaaattataggccaatttgtataatggatgttctatctgagatgtatgtcagatttcctgctaagaatactgtaagcttgagattcccctcttagtccagtacaggagtctcttggaggatcagttggtaatttccattgaaggaaaagaaggatgtgttcttggcttcccttcttttttccatattccttaaggacatatactatgtttagattagctggatgcatgtcgccctattataaatgatataatattctagggttcatggatgtatacatatgtattaaaagcataaaaacaaaaagggaacaatgccaaattcaatatagtagtagagggtgggatatgggactcgagagataacatgaggggcttcgattgtacttgtgacaaatttttctaaaacttggtagtgggtatgtggcattcactatattttatatatttttgcattttaatagtaatagtaatttaatattaacaaaggaagacctgattgtttaccttattcataccagaaagaagggctgtggttgaattattatgaaaccaaagggctgggcacagtggctcacgcctgtaatcccagcactttgggaggtcgaggtgggtggatcacgaggtcaggagatcgagaccatcctggctaacatggtgaaaccctgcctctactaaaaaaaaaaaaaaaaaaaaaaaaaaaaaaaaaaaaaaattagctgggcgtggtggcaggtgcctgtagtcccggctactcaggacgctgaggcaggagaatggtgtgaacctgggaggcagagcttgcagtgagcgagattcccccactgcactccagcttgggtgacagggcgatactctcaaaaaaaaaaaaaaaaaaaaaaaaagaaaccaaaggattttttttttcctttccattcctgccttctctcattccctccctccattccttctggtaaatgatgctctctaaccctgtctcaccctcctttctccacctattgacatatagttaatcacctacaatggacaccttgacaaagttattttgtatatttttgcagatagtttagctttggagtcagacaggcctggtttctaagttttttgtttactagatgtgggaatttaggcaagttacctaaacactctgaatcttgttttttacattcattaggtgtagattataataataactacctttggatttgtggtgaagattaaatgagattgtgtatgtaaggatctggtatgtagaatcaatgaatattagtgctgttctcatttttggtaccccatagtaccttgcacagtgttaggcacatagaacctgctcagaaaatacttactaattgactgtatattacatcttaataaaatcttgttaaattgttttcaggaggactttcgactgcattttagaaatatttcaagaattatggattgtgttggttgttttaaatgtcgtctgtggggaaagcttcaggkaagcaaatttagtcattcctatttctcatttaccctttgcatgaataattttctaatttttcttttttccttatttctattacagactcagggtttgggcactgctctgaagatcttattttctgagaaattgatagcaaatatgccagaaagtggacctagytatgaattccatctaaccagacaagaaatagtatcattattcaacgcatttggaaggttagtttgaatgtactgaaatgcttctggtagccaagtaagtctaatgcaacatatatgctctcagaaaaaactgggtaaggaatatcctttttattttatttgtttatttatttttgagacggagttttggtctgtagcccaggctggagtgcagtggcgtgatctcggctcactgcgacctccaccttctgggttcaagcgattctcccaacttagcctcccaagtagctgggattacaggtgcgtgacaccacgcctggctaatttgtgtgtgtgtgtgtgtgtgtgtgtgtgtgtatttttagtagaaacacggtttcaccatgttggccaggctggtcttgaactcctgacctcaggtgatctgccaggctccacctcccgaagtgctggattacaggcgtgagccactgtgcccagccaggaatattttttttgaagaaatcatttcattacagaattatgggatattatgaaatacctccagtatgtagacatatacaattagtacatgatcgtctttattttcctctattgacttttataatcataattagggccgggcacggtggctcatgcctgtaatcctagcactttgagaagccaaggtgggtggatcacttgaggccaggagttcaagaccagcctggccaactctactaaaatcaaaaaaaattagccaggcatggtggagcatgcctgtggtcccagctactcaggaggctgaggcagaagaatcgcttgaacccgggaggcagaggttgcagtgagccgagatcataccactgcactccagccagggtgacagagcaagacatcatctcaaaaaaaaaaaaaaaaaagtgtgtatatgtatgtataaaatcataattataattactcattgaattttaatattcatcttatcgaatttgtacattaaaaattgcttaaaagcagtttttttatccaattatttttctgatagtggtagaaaaatcatgttgtttaacataggtgtacatgtaaatctctttgtgaactcaccattatataaaaaggttaataattcttttaaaaataattatttcctatcaaaatgattaaagaaaagcatgaaataaggaacttacattaaaatatttaagtacagatgcatttccttctggcctatcatgcaagaaatgctgagatttataaaaattaacattttttaaaggactacatttcctcatttaaaaaatattacaattttgggcttgaaataattgaccttcaaaattgtgtctctagcatccaagggctagatagttaatatttcattgattattctgtttttttcatgatcragagcagagctaagtgcacttaaaataaggaacaaaatttactttacaaaaattagtgaaaacagtgtagtcatacgtttaatactcttactctttataggccaatagcattgattctttctacatttactaaatatggtgtattttaagtattcatatacttatgcatttaaaaatgatatttctgtgtttatatactttatacttacgtactttaatattaagcatacgaatacttttatgaatacttatacctaaatattgtattatttgtatacttacatattttataccaaatactatatactttaatattaagggagtatacttatgaatgcttaaaatatagaagtattttaatatttaygtatctcatacttatgtatttgattgattgattgaccgacgtgatctcagtttacggaaacctctgcctcccaggctcaatagattctcccaccttagtctcctgagtagctgggatacaggcacacgccaccatgcctggctaattttcttgtttttcatagagagaaggttttgccacattgcccttgctggtctcaaactcstggactcaagtggtctgctcgccttggcctcccaaagcgctgggattacagacatgagctactgcacctggctattttatttatttaaaagaatttgattttttagagataggatctggctatgttgcccaggctggagtgcagtggcatgatcatagctcactgtaaccttgaacttctgggctcaagcagttctcctacctcgggtttccaagtagctacgactacatggcacacacagccatgcctggcaatttttaatttttttttgtagagaccaggtctccctgtgttgtccaggctgttctccaattcctggcctcaagtagttctcccgtcttggcctcaaaaaatactgggattacaggagtgaatcactgcacctggcatatgtatttaaatacttttaaaataactaatttctagacattaatatcttagttttaccttgtcgaattaagaactaaaatatattaaaatacattaaatggtttatgcaccttaaatttattgaaataaattactttaaaaatgttttaaaatgcaaagtgaataacttttacagataaaatttatctragatggtttctgagtgaaatattttttggttacagaatttctacaagtgtgaaagaattagaaaacttcaggaacttgttacagaatattcattaaagaaaacaagctgatatgtgcctgtttctggacaatggaggcgaaagagtggaatttcattcaaaggcataatagcaatgacagtcttaagccaaacattttatataaagttgcttttgtaaaggagaattatattgttttaagtaaacacatttttaaaaattgtgttaagtctatgtataatactactgtgagtaaaagtaatactttaataatgtggtacaaattttaaagtttaatattgaataaaaggaggattatcaaattcatatatgataaaagtgaatgttctaagtctctcaaactagcgttttatgtaataatatgtaatataaataaaactatggtaaatgtgacaagcatttaataggaaaatgctaaggaggcctcataaatgacccataattaccaacgtagaatttttcagtacatttagggttgctggatttagcaaataaaaataaagattgcccagttagatttgaatttcagataaacaattagttttttaatattttacatggaatatttggaaaatacttatactaaaaaattatttgtttgaaattcamatttaactgggagtcttgtattttatctggcaatcctaaaatacattggtatgaaacaaatcacttttagaagtatattgctattttgattgggttgtttttgtgtgtagaaacgtacaataacaactcaaaggcacaggagatttctaaacattgtgaaaagttgaatagattatatatttattctcataatactttcactaatactaaataaaatttggggaacactttttatttttatataatttccaatttacagaaaagtttcaaaaatagtacaaagagctctcttacccagattcactaattgttcatacgtgctttatctttcatgctttctctgtacacacacacacacacacaaatttttcctcaatcatttgaaagtcagttataggcatcatgccccttaaaccctaaatacttcagtgtgtaatactgaataattactaaaaatgattttctcagaaaaaaaaactcccacaattctggaactataatactgtaagccttagaataaataatactttcaagttccaatctaaagttctttttgagttttgttgcccgttttatgcttgatgtgtatagtaatagggtaggctatttattttattaaaattttttttagagacaaggttttgctgtgttgcccaagctggaacttgaacgactgggctgaagtgatcttcccacctcagcctcccaagtagctgggaatacaggtgtctgccaccatacccagtttcatttttgttttttatacccgaagttcatttcctttgtctccctaaaactgaactgtaattttgggaggttttcattagtggaagctcttcatttataaagctatttgaaggggtttaggaatttatatcacatggtaattgtagagaaaaagaagctatatacctcaaaatcgtgccctctttamatatgtcttatcaggtataacatgttgaaatgtcacattagtagtaaagtggggtttatttatatagtggttaagaaatgtcagtttacactgctgtatacttcttcttctgtgtccctaaggcctggtacagtgccaagcacatacttggtatccaataaatatttgttggatgaatgtatgcatatgtattcagtatattttaaatgaataatcacagaagtaagtttaataatttgtcctatttttctctgtcacttcctttttctctaaggcaggaaaggaaagacattaaaccattaattaagtcaatcctcttggagactcaaaagactatgaagtgatcactctatataaaatataaatacagtgtgggttcaaatggccattttttgtgtgtccctctctctcatcttatgcttcccttcctttttttatttttattttttggagacggagtcttgctgtgtcgcccaggttggagtgcagtggcgtgatcttagctcactgcaagctctgccttccaggttcacgccattcttctgcctcagccccctgagtagctgggactacaggcgcccgccaccacgcccggctaatttttttttttttttttttgtatttttagtagaggcagtgtttcaccgtgttagccaggatggtctcgatctcctgacctcgtgatccacccacctcgacctcccaaagtgctgggattacaggcgtgagccaccacgcccggcctcttttttttttagctgccaatctttttgaaggaatattcttacctctactttgtcaccttctactggctccttaactaaaatctgccatttggctctctggttaacagtcccttcctgtaaagtctaaaatcttaattctaaatccacagtttaattcacaagctagtacttgactttttttctgtatttgacatttttgacaacccctactttaaagatttattcccttgacttcttacattttgctcactcctgaaccaccccccaccttttggcctcttcatttattccttaaatgttattcctcagacctccattttttttttctctcttaatcacaacaccacttctcacgcttgggtaattttaattcagcagttcctaaatccttatctttagccagactcctcaatccatctgcctgttgcacttttcttggttgtcccagagacacctgtgtgtgtcttaaaacattcattctctgcaaaacctactctaatgcctgtgtcccttactttggttaattttagaaccattatattctaagttttctaggctcattcctctcctccaccttcccctatcatttagtgtctaagttttactgattttatctccacctctctgatacatcactctttcatcttcattgctattattaataaatacctacagtactaacctgcctcctatacctagctggtctcctctctgttgctcaatgttaccacagcaggctttctagaagcactctgacagtgttactccctaatatccttcagtgacttcaggaactttcaggagaaagccaaactcctctgtttggtgtacaaggtcttctgatgtgtttcctccaccgaatgttctggtgaaacagacttacacttcttcagaagccacatttggccaggcctcccgccttggtaaatgctgtactctttgcatcaagtrtgctagtcatccttccccacttggaaaattcctatgcatcttgcaggcctgacataagcatttcctctgtgaaacctcctttgctccactcaaggagagtcatctaacttccactttcgtgtcaccactgtaattacaacctacctctattgtatgtcacttaaatcgtactgtattgttttwtttttcaaaagtctttactagaatgtgagctccttaagggcaggaaaaggaacctttttattttttgcatctccatagcatagtttttggcatatgaatgtttaataaatgtttgttgaataaattgattttaaagtgacatctttattatattagaggtcctacctatattccaaatactttcactcccttcactttacagcaagggtcagtagagtcccaaggatttgtagactttagggggtcaataaagctgaaattgtattcaagatttggtgtggtttttggtgggtcatgaaaggggtctattcggggaaaaaaaggaacttctttcatgggaaaaggcagcatcattgaggaatttcttgaataatcaaataataccttcctaggattataaggtagataaatggattcctgtttaagattctgaagggaaggggagaagtgttataaattatttcatacaacaatttttcttagcttaatgtttgaataaataaaaatgttggtaccagtaccatgctgttttggttactgtagccttgtagtatagtttgaagtcaggtagcgtgatgcctccagctttgttcttttggcttaggattgacttggcgatgcgggctcttttttggttccatatgaactttaaagtagttttttccaattctgtgaagaaagacattggtagcttgatggggatggcattgaatctataaattaccttgggcagtatggccattttcatgatattgattcttcctacccatgagcatggaatgttcttccatttgtttggatcctcttttatttcattgagcagtggtttgtagttctccttgaagaggtccagagatatagatcaatggaacagaacagagccctcagaaataacgccgcatatctacaactatctgatctttgacaaacctgagaaaaacaagcaatgggaaaaggattccctatttaataaatggtgctgggaaaactggctagccatatgtagaaagctgaaaatggctcccttccttacaccttatacaaaaattaattcaagatggattaaagacttaaacgttagacccaaaaccataaaaaccctagaagaaaacctaggcattaccattcaggacataggcatgggcaaggacttcatgtctaaaacaccaaaagcaatggcaacaaaagccaaaattgacaaatgggatctaattaaactaaagagcttctgcacagcaaaagaaactaccatcagagtgaacaggcaacctacaaaatgggagaaaattttcgcaacctactcatctgacaaaggctaatatccagaatctacaatgaactcaaacaaatttacaagaaaaaaacaaacaaccccatcaaaaagtgggtgaaggacatgaacagacacttctcaaaagaagacatttatgcagccaaaaaacacatgaaaaaatgctcaccatcactggccatcagagaaatgcaaatcaaaaccacaatgagacaccatctcacaccagttagaatggcaatcattaaaaagtcaggaaacaacaggtgctggagaggatgtggagaaataggaacacttttacactgttggtgggactgtaaactagttcaaccattgtggaagtcagtgtggcgattcctcagggatctagaactagaaataccatttgacccagccatcccattactgggtatatacccaaaggactataaatcatgctgctataaagacacatgcacacgtacatttaatgcggcactatccacaatagcaaagacttggaagcaacccaaatgtccaacaatgatagactggattaagaaaatgtggcacatatacaccatggaatactatgcagccataaaaaatgatgagttcatgtcctttgtagggacatggatgaaattggaaataatcattctcagtaaactatcgcaagaacaaaaaaccaaacactgcatgttctcactcataggtgggaattgaacaatgagaacacatggacacaggaaggggaacatcacactctggggactgttgtggggtggggggaggggggagggatagctttaggagatatacctaatgctaaatgatgagttaatgggtgcagcacaccagcatggcacatgtatacatatgtaactaacctgcacattgtgcacatgtaccctaaaacttaaagtattaaaaaaaaacccttaaaaaataaaaataaaaatgttgtactatctaataacgtattggcattttaaactgcatggcacttcatgtcaaactggtgtatgtggagcaatatgacatccagatgtaagtaattatgagatcactaaaggcgaactatcatttgtaactcctgattttttttttttttgtggtagcactatgttcttattcttatatgatagaaactcagtatagtccattataagagatgaagaaaaccagaactctaaataaaagcacaaacacttttatttttaatagtagtgttttgttacaatttagtgaaacaacaaataaatacattcattggccacagctatacttttacaaccagtttgaaactgattatatagctgagaaacactgttaaacaataaaaaaggcagctatgcataaaaaagccactttagctataaattacattttccataaaactacaaccaactacaatgagtggtaaaggtttcaaaattaatggccacccaagtgaaatgatgaaaacaaatactgctaatcactatagaattacacacttaagtaatgaaattcactttttaatgaacaaaaatgaaggtttgatactgtcatcatgtgcttcagtgcaggatgaacagggaatcggtagccctttgattttataaacaactcctttcgagaccaaacttaaagtgctcctagtgctttggaatttttaagcaaagattgggccagagtgtatctttatttgtctttggtgatatgttagatgtgtataaggagacaaatgcaagaatttgggtaccctagtcagtgataagaataaacttacaaacctcaaatttggaacaatcaactaatgcagcagaaagaaccaagttattttatctgaaaaatttttaaaaagtaatctttgttagtttggtcaaataggaacattatcgaggggagccttactagaaaaactttatcaccttgaaccccaaggattaacaaagacaacatatctttttggacagctctagatgattagatgcctaacattattagcaaaataaacagttagcattctgagaagcaatctaacaactggagttgtaataaaagtacgcttttgtcacttaataccacgggtaactttttatactatacattttaaaataatttggttacaatgagagaattataaacaaacccaaaataacataagtatatgcttctgattgaatacaaagtcattttgtatcataaaaagaagaaatttatttgtctgtgtactggcctcccaaaagatcgaaagcattaacaatttcaatttttccttaaggtttcaacctagtgttatacttttatgaagttattgtatcagttgttaaaaagttgaagtacattttaagtaagcgaggaaataacattctaatcaaagtataaaacagaaaaggatagtcgtattagttccagttctgaagaaatagctagcagacaattgtagtttgtctttgagcatgttgtgacaacttcccaatgttgcttgttcccttggcatcttgaggtattcagcatctacttctttccatatagacactggtacaaagtgcattttaaaattctgtattatctcagcctgccattttctttttttttagatttgggataggacatttaagacagttttaatgtaattctaaaagtactccaatattgttaacctgtggttttatacttacctagtttgtacatttacttaagtttgctcatttagtctaatgctggaattaatctgaattcaatttaatttggcttttcccatatataagatataaaaatgtgaaaatcataggaattatatgtcttacaaagtattgcacttgagttcactgcaataatgtatcatgatttcatttacctgaggacaatcctgattcactaggtaagaccagctatatcatgcttcagagaaatcaaatgcttttgaaaatatatttatgttttaatttagaattacacattttgtgaataattcttaaatgcatctctaaacttgtttagtcccaagaagtttctaccaaaatctccctatgcaaaagtcactattgctttcttcaagaatcatgcttaaactactacatatatctcaattacacaaaataatcaactgaccaattctactcaaaatagccacacaattttcactggtatattttcctcttgaaattattgtggctctccaaagaacactgctggccataactaatggattactaccatcatttgtttaaaatgattgaatttcagttgctattttaaaatcatgcttaaaagaactgtcttcaatgattacacattttcagtagatttttataaagaatgatacatttttatgccttaactctgtgcactgttcacactataaaatttttattaagatatctgtatagagcataccaatgaatataccggctttgattttcataggaaaattgccttccagtttggtgtacaatacagtatttcagtgtgaacattggcatatgactttggggactgcagtgactcagaacaaagataaaagtgcacatatgcatttgatgttccaaagtcaggatttttggaggccatcaagtgccttaagatctaatctctcttttctcctactccaaactttccattttacttcattttactatgaagaggtcaaaaataatagctgtgttatttaccaaacacagccacacttccagattttgttttcagttgcaacagataatggaatgtttatgtagatggaatttaaacacattgaatatacacatttatgaaaaacaactcaagaatcatgacttggtgatgctgtcagttttgtggtgtcacatataagctatgatgattgttcaaatctaaattactacaagtaaagagcaaaggagcagtatctgtcataggtccattcaggtggggagtgactgtgtaactgctgctgccacacccagtcatggtgccataccagcccaaactttgcgaatttggtaaactgcaacaaaaaaaaggcaaaaagaccataggactatgatcaggatataagaagtcacatttgaatttttagcattttcaatgaattttgtaataaagttagcactcaaatacattgaaatatgttctttgtcaaataacaaaatgcttttctacaaatttaatgacttttatctaatatcctggattctatatcgcagtatgttacaaaagaatgaataaatgccactcagaactggtagaacttgattgtcagatgacaacaatgtagtccttatgtactcagctctattctaagacatctatgtatgtatgtatgtatgtatgcagacacacatatacattcatttctcacaacaaacctctgaaataggttctattatccctgtcttacagatgaaaagcaggttcaaaaaactgaggttatataacttgcccagatgaagttaggattacagaaaatgtcatatcaagctgaagccattatgcttcatggcttcagccattaagctttcctctttgcccgaatcacagtcaatagtgtactagttacggacttgaaatggttttgtaacaaggagggcatgggaacatttcctatggcaattaagcttcccaagagttttatctagggtttctctggattttgaccagcactaaagatatggaaacagacatataatcactataatagtatttcttccttgtgcatccccctcccacaaacagctctgaaccaacaagtgatcccgaaatgaaatggtaccattttagccaaaaggcatataggctttgagtcaaatggtagttcctgataatgcaggtcccaccctgggtttaacatctactgctttaaactccagtattgccgatcttatttattgacatattaccactaaatcaccttttttcatattttggttaaagcttagatttgtttttttcaatcaatttcaatagtaattcaggctaagtggctttgttacatctaccttccttctcttgaacttcccagtcttggca

SEQ ID NO: 95084 - DNA, 30161 bp, Homo sapiens
  misc_feature (1)...(30161): n = A,T,C or G
caaatctgcctcccattctattcaaagtcacccctctgctcactgagataaatgcatatttgattgcctcatttggagaagctaatcagaaactcaaaagaatgcaacaatttgtcccttatctacctatgacctggaagccccctccccacttcgagttgtcccacctttcctgactgaaccaatgtacatccaacacatattgattgatgtctcatgtctccctaaaatgtgaaaaaagaagctgtgcccctaccatcttggacacatgttgtcaagacctcctgaggccgtatcatgggcacacgtcctcaaccttggcaaattaaatttctaaattaactgagacctgtctcagatttttggggttcacggccttcacttcctatttgcataaaacctgaaaattcaccagaggtgagtgcttaaggtcttctcaggccttttcagagcatgtgtccaaccctgggcgtgtgcctcatctccttgatcccccagcatagatggtagcttttaaaatcccttattcccctaggcatctcctttcccaagcccttcttccctaggtttggtctgtttattgcttgccctgagtgtcattcattgccctagtctgctgcagccaacacttttgccttcaaatgctttcagcaagccactacttgggaagttgctccagtcccaggaatgctctgagttgggcaaaacaaaggcaagcccttgcaccaatccttcagggagctaccagacaggccgcttgaaacctacaaccacagttctttgagaataaggttcatgtttttccttgtggcattagcaacctgaactcagggtatgggttgccgtcttcacagtcatattgctctggagagtgggatatggtaggcgggcaatttaaataccatagcactcttttatggcaatttagcagcttctttctttattgagcttcttgtaagttcttgactggattccagagttctacaaaagttgatttagataattttgctttattcatggattttgtggagaaatggagtcctggaattctccaccattttcagtaacatcactcctttcttttcctttttgtatctcattgcatctttatatattcctaaaattttaaaaattgtttttatctttatgaataggctattacattgcatattattatttgtcctttttcaaaagctgaataatatatagccacagtttatccctgtctttgtatgtgatactgtgcttcatgtttttcctgataaaggatattctggagtggaagtatttcggggagattgatttggccttcactatgtaaatattgtttgcatgccttaattcagggtgagttagcctaagggatgctcatctttcttctttctgtttttttttttttttttttgagatggagtctcactctgttgctcaggctggagtgcagtggtgtgatctcggatcaccgcaacctccgcctccccagttcaagtgattctcctgcctcagcctcccgagtagcggggattataggtgcccgccaccatgcctggctaatttttgtatttttagtggagacgagattttaccctgttggccaggctagtctcaaactcctgacctcaggtaatcaacccgccttggcctcccaaagtgttggaattataggtgtgagccactgtgcccagctgggatgctcatctttctaggtatgaatcagcaggtagttttaaaactcctggtatgtgcaacatggtgccaacccccaaagggtatgttggtgtgggaagttggccccagctgatgcctgactcaaatgtgagatgataaggatgggtgcagaggtgactatctgtgaacacagaaatggaggggagaattccaaggcacttttgaaaaagaattaacagactatggaaacttggatatgatgatagacaatcaggaattgaaaccgcctcccaggatttcaagcctctaaagtcgggggacgaagtgattctactaagaaaaacaatacagttttgaaaaatgacaatgcacagctggatttcattatattgcatgaacatcttagggtctgttcttcattaggttattcctcaatcaaggcaagagtcttaactcttctctctgattttggagtcttccttctcaaatctaacttgcactctacactgtcagaatgaaacccatttcactgcttttctagaggactacttactgcttagagtgcctggcttctcagccattacctccctgcccagttatctgctcccaccctccccaggtggggttggggcaatgttcttctgcactaacttcaccagctgtggctggggaagttttcccttccagaccctctctgtcttcctgttgcctttctaagttctgtaattcctttgggccctagcttgagtcctgctttttgcattaagtctttcaacatgtctttcttccttttcagaataggagttgtatatgggtgtgtaggggtggaaaggtgttatgctttccttacccatcataagggtcacagctgatgctcttataacaaaagacggattaacaagggaaaagcataatacatttattttatcaaagttctgtttgttattttgatatctaaatgtacaatctgaatcaatttcatctttctttcataagtaacttattcatgctccagagtggcatctacaggaaaagtttgtgcttaaattaatgaggcaaaagcagtatatccacttgaaaatatttcattatttagccgtttaagtcagaggagcttctagccaaagtttagaaatgtttgcacttagacaacacctgcaccccccacctctgcacctagggtcctccctgtggcctccccatcaggcatggcagtgcagagccagcaaagggtaccatctggcagggcctccccaccacccctgcggccccgtggtgctgcctagggtcaggtgccctcgaagctccatcactaaactgctcagtgggacttacaggcactgcttattggaaacagtcttccactggatgttttatattcagagattcatcggggtaaatctgactgaaagagagatttattttgaaagccaagtttctccagaggcttgtcagtgaagcttcagagttcaaggctgctgcatgtcagtgagatcaactgtgtgcctttgacacattggacttaggtaatcagtccagtgtggagtttggggcttggagtggccattgggacaattcaagcataagagagatgggaacaggctgtgcgtaagggaggacttaatttgtgtttatgatggtaaattagggccatgaagtccttgtaggttcaactctcaaagtaattacatctttgctaagatctgccaattctttctgaagggggtagattgaaactacaattttaactcttggttgaattgctacttcttttatcaggtaaaattcattgcaaaagtgaaatcttttggctagttctgcactgccagagccttccattattatctttttcagaaacatactgatgaataaggaccttcactgcagcattatagtgatgtgaaataactggagaagttgaaaatatttaaccactgaggaatgaatggtttaataatttatggtacatccttattgtgggatactattcaagtattaaaaaataaggcctgctgggtgcagtggttcacgcctgtaatcccagcactttgggaagctgaggcaggcggatcacgaggtcaggagttcgagaccagcctgaccaacatggtgaaaccctgtctctactaaaaatacaaaaattagctgagtgtggtggcgtgcacctctaatcccagctactcaggaggccgaggcaggagaatcacttgaacccgggaggcggaggttgcagtgagctgagatcatgccattgcactccagcctgggtgacagagtgagacttcatccccccccaataaaaaaacataaggcctatctgtatttagagatgtgaacagagggccacgatatattgtggggggaaaaagcgagatgcaaaattatatgtgtatatgtgtatattcacatatacatacatatgtatacataccataatctatttttgttcagaggaaaatcatatgtatgtaaatagactgcttaataatattagctgatatttattaaatttgtattgtgtgctagcactttgtccaatactcatcatacctaaatgacctcatttagttctcaaaataacactaggaggtaggtaattatttaacccgctttacagcagaagaaacaacagattagaaaggttaggaagccttctccatgctgcatgggaggttacaggcaaaagttggaccctagtccagaagcctgcacttccatccaccatgctccgtgtactgcttcttaacatttacttgctagaagaatataaggcatcctagtatttagttggggtcttaaatgaaactcatacttgagatgagtttttaacgaggtgcctctcagatccctccctcacaccctcaattggcatccaggctgccaaagccccctgcacacatatctgtgtaacagatcgtctccccaccctgacgccttccaccccatggtgctgttacttatggaattcagaaggcagctactgctttgttttctgtcttcctgataactctaggaaccttgaagagtacctgctacttacacatcatcttgttcttaaatcaaatttggaccataattgttatcatacaattttaactgctaaggtcacctagttctacagttcaaattaaacattagctcatattgcctctaggtttaaaactaatgtacccagaagaaatttactaagggccagcaatgttgaaatagcttaagtgcaaacagaggagtcctgtgtgctggcaatgacaaggcgatgttgtctaaagtccctatttgattcctcgtttgtccatcccttcccagtggccttttcctctctgaactttcaacagtcttgtgcctaagcacttcagttcactccttgttaaatgccgttgattggctatgcatatgtaacatcccttactttattccagaagaggtcaccttaatactgctttaattccctgaagggatgatgtttggtcatcagttagcaaaactcaagctttggagcaccagaatgtgtgccagaaaaaatttttccaaatgcttgataataaactcagaggggggtttggtcaccagaattgttaggtgaggctattgcttcctaacttttgcttcccacagtccaagctttgatgcacaaggttatggttgattactttttattgcattctagtgggaactggtttctccacccatcctcattttctgtggtctcaattccccattgttccttgggtctgaggatgcagctggatctgagagtgtgagacgctgtcatttagtacatgaactaaagatataatcctgtttactactttttttggtcaaagcaaaaaataatgcaagagttatgtgaacacgatgtttattacatgtatagaactgaatatgtagatgtttataatccggaagctttgggaaactggactttgataatttccctgtaatgaatccatttctcaaaagcatttttttctaaaaaaaacacacacacacacacacacacacacacattgttctctgtaacctccccagatagatactttttaaagatcttgcttgttaaaatgcctgccagccttttagagaagttgacaggttaggtggtttctgttagcagaaacacgtggactcaaagcttttcctctaaaatgaatctgttgtgtaacatcacagctggctcagaatacaggtgcgtgctcctgctctccctgagaagatagaatgggaagagaccaatccagatgagacgcaggggaggaggggacacccaacagcaaaggcactgttgcaatcttagcctaaaccatatctctgagaaagagtttcttgttgcctgcttgtatctctgggtgatcacagacccctgctctccaaggtgggttgtgaactctggagcactaccaagattggctaagagctgaaggagagtcccaaaggagcttcaattcygcagaactatacagccttctttaccttaccttgaccaggtgcttagagtttggaaagtcagggataagaattgaaattcctccaggtaagaagacccccctcttaggaaatggactcctccaattttctcacatgatttttcaggcactttcgcttttccatatataggagtcgctcaggagcaagctgtggcaagctggagggagggacacatcccgtgttccatccactccctcccttctcagcagtcctcgcctgttctcacgtgctyacaggcagttaggcagaagtgatccccgtggctctgccaaagacaagcctgttgggttgaaagaagaagaagaagaagaagaagaaaaaaaaactcaggcaaagtcacagcctcaaaattgttcactgaaagaagcgtgagtggagaagtgtgagaagatgaatggaccggtggatggcttgtgtgaccactctctaagtgaaggagtcttcatgttcacatcggagtctgtgggagagggacacccgggtaagtaggctgtcttggactgactggaaaacgatcattccaagcctatactgagggagtcacttacaaatggttttaatttgacacataataattgtgcatatttatggngtaccgtgtgttgttttgatccatgagtataacatttaatgatcaaattaggataatgggcatacccattgccacagacattgactacttctttgtggtgaaaacattcaaaattccctcttctagcccttcagtcaccctactgcgcaatggaatgccagagctcattcctcctatctgactgtaacttcgtacctgtaggagtcacttttaccagagctcttcagagcaatgtgtgtgagttaccagaagggatctctagagaaacagcatggagtagtttcataaaacagtccctcctgatgaagccgtgctgtggcccaccaccagcacgccagcacagtgggtccaagacagggagtagcagctggctggctaagagtatgacacatgcaaaatatatgatcaggtcttaactttttatatgtattttttttttaggaaagctttaatctattatccatggccaatttaagtcaacagggaatgttcctgaaacaagaccatgggtgactaaattttgcatgtgaagcatgtgcaacttaggcatgaaagcctgcaccctggtcactgctggggtagacctctaggtgctggggactcagtaacgttctctaagagcagaatagaagaccttctaaacaggaagaaaatttaggcattgattttggtccctgaaaagtaggtagactgtgatgtgcggaagtgagagaagcttccttgatgacggtgagaactaggaccaggacattcagagcctcaagtgtaggacagtggttctcaaacttcagggagcttcagaatcccccagagggcttgtcaagacaacagagggctgggccccaccctccagagtttctgattcagtaggtcttgggagaggctcgagaatttgcatttttgacaagttcccaggagatgctgatgctctggggtgagaaccactgctcttggagacccctgggggatagatgtacagacttctatagttaagtccctcttcaaaattcattcgagtgtttgctaacttattgccaagtctgcctttttccatcttccttgctcttgttcttcctcaaagatatttatctttcctaccttgtaacttggctttggacacctcagtgcactactccttccatatactttagccagtggtttttgactggtggcagttttgccccacaacccccaagagcattttgtactgtctggagacatttgcagttatcacaactataggaggtgggggtaaggtgctactgccatgtattgagtagaggtcaggcacactgctaagcatcctacagtgcacaggacagcctctcaagaattatctggcccaaaatgttaatagtgcagctgttgaaaaaccttgaattgaattgagttttttatgtgacttagctcagttcaatgtaaatagcctctttcattgtgcataactgtataaagtatctaggtttactgtattttcaatctcagatacattgctgatttctgacacattctgatcagctccatggctatgagcctcatgtataggttaggagaaagattcactccacccggaggaagtgggttttttggcatgcagcggctagtggtcccaagaatggtccattgtgcgcagcagcaatgtgctcagaggactgagaatgaacgtgccagccaatcaattgattgttttgtatacttaatgacagccaatcaatttgtctaatcgtcccttgtacttgccattgtaattgtccaggtaagtcagtttccatggaggctaggtgactttctgcttgtcattccattgctgaattcctctctgctagaaagataaaggttttcttctctggttttccaaaaaaacaactattggctatcttaagcctactaagtgatattgataaaaattttgaaagccaaaacaaaaacaaaaacaattcagaaacaacctccttgggcattgtcttgtgtgtggtgctatctggaagcccctgctggactccagctttgttccttctcctgttggatttccctaggcagagtgggagcctgtgagctgtgtctgcacaggcagagamattcacaatcaatgatcagtcagcaagcttctaggaactctgatgggtaagcctaaggtggccagcatgtatttattttaggatattttatcagcgagaggccttcagtggtagaagtgtgtagaggctaagggctcagacaaacctaaaggtactaccagggtctgccactggcaggaggctagattaaacaaacaaacaaacaaacaaaacacaacctcaaacatatgtttagcagtagtttctaaaggaaagattaaggaattaatgaatatctttaattamagaatttaacatctgcttttgagagccaaactgcttgattctggatctggattcttaacaaaaacatattactctattaagagcagactgtgggtatttttaacactgaatgagctataatatatgtagatagagatcacttttatttcttaatttgtagatattgacagtttgcataaccccaaagcaagagtagattttcctacaagcaccatttagtgctttacattttagaccctgcagagtctttaaggcaaatagtggaagaataaaatcaaattccagctcatgttgaacccttgtcagtcctacmgtaattgaagaggtcaagcccagctctaaggacacctggctttcgggaggctgagtgaccatgtgggagatctgagagctgcttatggaagtaytctgcaaaacaacaatgatgtataggggttatcttgtagaattyttatgggtggagtcatgtacttgggtgtggtgttttatatacggtgcattgcatcttgtggaacctgccatgcaatgcagctgtttgagccgtctgattttacctcttggcaaagaggtaaaattgacttcttaactatttttaagttcattttcaggacttttgtagatgttagaattaaagggaacatgatgaggaatgagagattttttatttagaagaatgcgtgtgtgtttgtttatgtgtgagttgcgttagactcctagaagagctgattttgaccgggcgcagtggctaacacctgtaatcccagcactttcagaggctgaggtgggcggatcacttgagaccaggagttcaagaccagcctggccaacatggtgaaacgccatctctactgaaaatacaaaacaaattagccaggcgtggtagcacaagcctgtartcctagctacctgggaggctgaggtgggaggattgcttgaacccgggaggtggagattgcagtgaaccgagatcacaccactgcactccagcctgggtgatagactgacactccatctcaaaaaaaaaaaaaaggtatttcttttttagggcattctatgactttatataatacgtgtcatccaaaattaggcaggaatggaaataaataaaaatttcaaagtatttctaatttcttatacttaaaaaaagtgttttccctctggtagataagttgatatgtaaactgaaaagtcgatatctaattattttaagatttcaatttgttatcccgaatatttttgtgattctgacccatatttgctsttgtccagataagatctgtgaccagatcagtgatgcagtgctggatgcccatctcaagcaagaccccaatgccaaggtggmctgtggtaagaaacacccgatccctccctgctggagacctaagtgggctagactgagaaattaatcatgggtataagacaaacgagccatactcctcagttccaaaatccatgtcctctgctctgcagtagatttctcaattatgagacctcccctgtgtagtaacagggaggaaaaacatttctaaccatgaaacaaatagataattatttttagcaagaatctaacgttaaatgtcatagcaaccataaatagcagagggttggaccagcacatggcctttctgatgcttgatctcattgggaacaaggaggtctttcaaagttcttaggtgaatcttccagacgggatgmaagagcttgaaacacaggtagctgcctagatggttataagctgcatcctcattgtaggagcctttgttggctgcacagatacctggcttcttctcttgttttctttcctagtttgtggtatgatttaggttttaaaataattagtgtcccccatttaatagcaacaggaaggcaacatcttcaccaattgtttttcaataaatcaatggctttcctaagagacattaatgttaaactaaagtactgaagccctggctcccatctgcataatttattgtgtctgaagactcatgtaggctgaagatcttcacctttatttgtgggataagttgtttggcaggaaaacctttgcctggcttgaagcctgtggcacagtggcagagtcatggactctggagtctggaggggccccagggtgatcaggtccagcctgttcattttagagacaggatcacggtaccctctgcatcagggcctggccaaggccatggggtagggtgccccagtgtgaagaccagagccttgctctccttactgtcattgtcatgtcttgtccactgcacagacccatccttccctctctggttgcatcctcagccctgtattgaatactacagggactcatgcccctctgaaggtagattctacccttatatctttgtaaatatctggagagaaggttggcctgctttgattttttttggtccagatcccactccctaaagcctgcagtggaggtttagcaatgtgggggatggggggtcacatgtgtggactaccttctttatgacagctacatacaaccatcatctccctttaatccacatagcagtcttataaatagctttattaaatagatgagggaacagagacttagaggggttaaataagttgtccaggatcacagcttatgactgactctttccaagacagcattggaagatgctcagtgcttggtgctgggattttttctttttattggcgtttctattttccttctggaatccattcctcgtaaggcccctcctgtgtcttttctgtctgcactgtgagaggtctgggaatgtgagcttccctttgctggcacttggctgctaactctcctcgctccccgctccctttcagagacagtgtgcaagaccggcatggtgctgctgtgtggtgagatcacctcaatggccatggtggactaccagcgggtggtgagggacaccatcaagcacatcggctacgatgactcagccaagggtgagggcaggcctccgggtctgaaatccctgttgctctctgctgatagagaccccagtgctgagtcaaacccgtgcctttcagcccgatgggagyatcaatactaccaggaggaaaacactcctacacttgtctgtcaggttccaggggtcaaagactctggcataaggatggccaacaggcgactatgcccagtgggcccagcacatgcccatctgttgttgattgggcttgttttaggccttrccttcttggcgctgccaaaggctttggaagagaaagatgcactgaataaagggggctgccctcctttggggacatgctcgctgccaggcactggtgatagtctcttgtgttgtcttaatcatttatgtacttatgcagacgaggaaatggaggcctagaggggtaaacagtctgtgtgagatcacagggtaagcagccactaggctgaggactcctgtgcttccactaaacctacttgcaatcatagacatggagcaagatgactcagtccagaactggtgctgacagcaggcgaggctggtccaggttagcaccagtgctacatagtgtggggccaccacccagggaaggggcacaggccctagcagaactttgaagcagattccaacatctgagactgagcaggccaggcagcggcacagcctggagggcagcaaaggacccagagagcagacaccaggtgcggagggcctgtatgcgatcacattctgcaggagcttcaggggccctttgtccatgctggcttcctgggcagggctctggccccaattcttagagtctccacgttggtctctggcattagatgttcaggcaattctaatttttaaagaaaaattcattttgggtctctgttagctctttcyctaattctctgaaatcactgtgagagatgtgatgacctcacgccatggcaaaaagacccacttccaggtcatcctgcctagctatacacctgtaatcaagatgcacagagagaagcatgactttaaaggtgttcatttctgcctgtgtcacataatcrttgtctagggtgatgtgtagcatcctgtgggtcagggtgctggacccccgtttgtaagtgagagagcccactcatggtatgatggtgcagactcgcagaggttcagtccagccatggcctggtgcagcccaaagcactcatgagcaattaatattggttgagtgcatgacagtgattttgagactcagtgggaagagaagcagtaagaaccagttaattctcctggtcgggacatgagggtattcacagaggaaacacattgtcccagagctgcagcttcctgaggcgttaccacacggagcctgttctaccaaaaaaaaagccaatttgtttatgtacatttagaccttattcaagtgcaaaactttttctgcattaggcaggagggaaattttccaggaggcaatgttccctagaaagggagaaatgagcgagagcccagccgtggctgagttgagctcagctggctgaggttccctgtgcccaagcttgtccatttacctgtgctcagtggacaggaacagccttagcagggtctcaggccagtggctcctcgttgctcctggctgcggtgttgctgggctcattgtcctttccaagtcctgtacctcccctcttggtcccctaagttctgtttttccaaattccttggagcccttgcttgatttttgagccctggggagattcattatttagacagacagtgattaggtaaactgaaatgttcagtgcagaacaggacagcttttggcagttctttaaagactgttcattgatttgtgcattcaaaaacattcattaggaaacaggagggtgtaaagggcaaaggtgacctgatactcccagggtatatgatgcaacatgaggtgcccyggggtaagttcctggcattgtgtctaatgaactgcaggcaggtccagggacatgcactgagagtggacgtggggtttgggcatgtggggtgggagctggaggtagaacgttctaggcagggacctagtggagatggaaaagtatatcatgctgatggctaaacttgagttcatgttggctcaaggagtcccaggagcaagggctgtgtcagactgaaaagcttcagttttattccttggcagtagatccccacctgaagcttgtacagaaacagcagcttggatctgtgtgttttctctgtaagccctttcaggctgtgtgggtaggagaatagatgggaargaagatggctgtgggggtttggagagtgagtgtgtcactatgcttgaccttgtggtgggggcgtccatgtattcagtcccttattctcacagtccctgtgactgagcccagcacagctgtgaggaggtgcgcacggtctcggtgcatagcagtttcctcatgggactcccagggctgagctactgctagtccagacttccccaaaccagtgcctcgcgtgctaggtgtagcaggcctgcaccctgtgcctcakctttgtagatgggaaagggcaggtggcttttccatttgccccagactctgtgtacctctcagggtcagaggaccctggcttggggagtctgtctggatagttcatgtacactgtatttgttcagtatgtttaatagttgtgtcaggcatacagctgggcttctgagtgacagtatcaaaagggctcttgattttctcctagtgcagtgatgctcaaactagattctgggaggcacctgtgggagagcctgaggggcagggtatgagtcagccaccgtcctcagccagaggagccttggcatcaccttgttttaatctgcaggtctctgtaggatgtgtgtgtgtgtgttaaccaaggtctaattgagcacagtaaaatgcaccacggagaattttggttggccaaagagttctacatgatagggtgggaaggtgcggggcctctcccatcctgggcctcagctgtgggcctagacagaccctggctagttagggaacccccacgctgacaccaaatggcatgtcaggaaccgagccatccattgggaagtttgyggccccctccttctgacctgttccccacttaggctcactttgcttccgcctaggctttgacttcaagacttgcaacgtgctggtggctttggagcagcaatccccagatattgcccagtgcgtccatctggacagaaatgaggaggatgtgggggcaggagatcaggtagctcggcactgcatgtgggagctgtgtgttgagctggctgggaaagttcatgagcagtgggttaatcacactgaggggtggattctngtcctagcacgatagccaggagcgagttgggaaccccagcttcacggccgtgctgtggatggctgtggttgctgacactgggtttgggcttgtctccccctcctagagtgttgggggtcagggatgacgtccttcccctgcacatgccagtggaaagctccatggaggaggcacccaatcaacrtggacacaccagggagatttcaggcttggagagagctgyggtcctcttggtctagggtgggcgccgctcagcctgctctctcgccacagggtttgatgttcggctatgcyaccgacgagacagaggagtgcatgcccctcaccatcatccttgctcacaagctcaacgcccggatggcagacctcaggcgctccggcctcctcccctggctgcggcctgactctaagactcaggtgagcagctgaattaccccaggagagccctagacagaagctttaatacccccaaatcctcttgattcttgattgtgtcatttttaagatcgaaatattcaatstgggcattcaaagaatggtcagttttgaaaagaactatttatgtgaaaaatcttcagctagagatgcttcccacaacattttattataaaaaatttcaaaaatacagagaaatgaaaagaatagttccgttttttttgtttgctcattagtaaacattgactaatgagtccccaaatcctgccacaaacatacttaactggcttccatattttcaggcctctttgtcctgaacaggctgtctgtgctgtgtctgtgctgtgtctgtgttgtctgtctgtgctgtgtctgcgctgtctgtgctgtgtctgtgttgtctgtctgtgctgtctgtctgtgctgtctgtctcatcatgaccctttttctcatctttgtttctcatgaaaaggctttacgtctgttgtttccagctccaaacccatgggccctgacctgtcttctccctgcagtgttgaaatcaacccaaggcctatatttgaaggctgaggtgattcaagtgttagtggagacgcaggcctcctggcacctcacccctgtatcccctccctgcttaaccccaatgagccctctcatgattcccaagttcccagcacttcatactgcacaacttctctccctgtgtccatgctcgtggaccccattgtcaccttcacatactcccacctgtgggtttctctgatcaccctccaagcagatgggccctgagagcctgccgtgtgcagcaccctgccacctccctcctgcccttcccccgtcctgttcagcgccatctctctccacctacccatgtccccagtttaccccatcaagcacccctctcgctccagctcagccttccccagggctgccatcatcccagccaggccaggatcagtggcctatccttccaaaggtactccctgcttggaaattccagctaatcccctttaggcctcatttttaattccctaacatctattcagtgttttctacaactttgggcttcctacaaggggaagggggaaatccacttattattctggcattcacaaccttttatggtcttccaactttacctgcytctgcctgccccacaccatctttgcttaatcgacatcatttcactcattgtccccttgtttcttagggctttgctttacctgagctccctctctggtcttcacctctccttcagtggccagcaaagttctacctcttttgggatgccatccctggccactagcagacagcgccagcgccttctcttgtcctgcacttggaatctggcacccatggtgttatagctcagcgtgctgtgtgtggctccatgtacaactccagttgtacagagatggagttccttcttgtgcaagtgtcagaccatgcacagggcagaggttgcatactggctgtactggggcagggaagtgtgcttatgcccaaagggaacccttccttgggacttcctgtgttatccacatgaccccccaaggtggggatgggaaccatcagcattccttgggtgttcttggaggttgtgagttaggagagctaaaacatgtagatcgtgatggcacccaaagaaaggggcccatgatgtcggcctgcctgtcctgtcctggactggaatggtgctgcgatatagaagcagggtgaagattcacagaaggggaaatcttagaacagggaggggaggtagccagtggctctgactgttttttctcttccttgtgcaagagagaggaacagagggaccacctactggacctgctgaaacaggttcattgtgcttagatatgaaatagaaggtttctaggtttaggggtcagcaaggaagggagggtgggatgggctcttttaggggttcccttcctttgaaggattgtctcgaaaatgccaatacagataccagagtcagcctcacttccctgccacaggcaggaccgcgggccagctccagtctcagggggtgcagacttgctgtggggctccaggaggcccctcgccagctggcctgcgaacagcctggcttgctctagacactccctccatgagagaggccctgggccaggcacagcttgtctaggtcccctgctccgcaccctgtttttgaagtagtgtcttcatccagctggactgctggctgtgagcaggatgggtctttccacctgaacaaatccctgctgctgatagtgaggcctgggtggcagtgtggatggctatttttgtacctagtcagagctgtgttttccatggtgtgtttttccccacatcttgctgacatgatgagataagcgccgtgttcagggccctttgctctgctgccctattctgcagttctgcaaggccactgcgtggagtctgccgggtgggggtggagtcacccaggggagcagtggagacggcctgagcaccctccccagctgtgcaccttctcccgaggctccatgcagactagacccagtcctagagtctgccacagacagtgcctcttttcctgggagtcccctaccccagattccagcccctttcccagggccgtgtgtgtgcacagcctggcatttgaggacttctctcagctcacgatgtctgtgtgcatcgggccatctcatgcagatcttacatggccaggactctttctcctrcttcttctggaccttccttgttgctccttagaccaggcagaacacagagtaggagtttgatacagatccagggtttgatggatacctgagtagccttggggaggtagagagtttgctgcaggcacagtcccagggagccactgtttgctgccccgtggttctgtccaggccctgggatgggagcagtcccatactcactggccagtgtccctcccagggccatctggcagagctgcacccctgcgggcaccacatgtccctaaaatcctctgagccctgctcttgtgggtccatgctgctttcggcagtattgggcctgtggccagcacagggtcttgagtggcatccaaccttcttcttggaagagccctgtctaccagcccatgcagctccaggtcagatcccagctcttccgactgtgtgatcttgaccaagacatttacattttggatccttggctttcttatctgcatcattggcaggaggagagatacctcctgggctatagagggtcaagaaagggctttggccagggggacatttgctggcacctggaagcctctgagacagaagaggagacatgtagtgggtcagaagttgagaggaaactcaagtctccaagcagtgctaattgtggccccatgtgggaatagctgggccttacacccagtcctcccacagcaccaggcaattttttgaacgtaagaatgtgtcagattaactcccccaacaccctttgaagacaggaggccccacttggctcctgggagccctgcccacctcctgggtgcctgtgtctggccacgatgtgccgttcgctcagcctcagcctcacagtatctcccccacccttctgatggacaggtgacagttcagtacatgcaggacaatggcgcagtcatccctgtgygcatccacaccatcgtcatctctgtgcagcacaacgaagacatcacgctggaggagatgcgcagggccctgaaggagcaagtcatcagggccgtggtgccggccaagtacctggacgaagacaccgtctaccacctgcagcccagtgggcggtttgtcatcggaggtccccaggtgcattcttgtctctgaacgaagccctggtttgtctttgttactggggttgcttatgtctcagagcaggaaaacctcaagagatagcttggagggggtcagctgactctggccatggactaaatgtaaagtcggtgaattttggcctctgtacatttagtgcactctctggggaggtctgctatgtgtctgacagtgtgcaagaaatnggggatatgtccctaggattcctccacttagcgccactgggccctcccactcctgccatctcaagtgaccatcgaccttacccacggctgctgcacctcaccctgctctggtgcacattccccactgcagcatttgcacgtggacagctgttcccggktggctgtttccagatcttcaccacaggctgcctctggctgttgtgggcaccagagtgggacagggtgttttagacagggcaccactgccccctctcttgtactgcaagtgtgaggaggtggaggttgagggcactgctgtgaggctgctgcccactgcctgggccctcagccgtgtgtgctttgccagagttgagctccatcccrggttccagtagcaagtagagtgtagaaacacagagtagaaggaggtaacacttattgttttttcttgcaggacttctcaaagcctagacatactagtatgaactgtggatctctaaaagggggagtagagcaggcagacttccccaaatcatttaacatagaactcccacccttttaaagacatcactattgactggtgttgcccagaggacacttgggaagtgggcagcatggcatttgctaggtggcaccagccagggttgtatttatgacagtgcagttcctgcctgcagttggatctctccattgtgatggactcagtaacaaaggcattagggagtggctgtgaccccagagaacccctggcccaccttctgcacttgctaatgaagctttggcaggttacctgwtttcaatatgttgtcagtgactgagctgggagtggagtccagagttctgggctaaggggtcttaggaaaatgtctgtgggcagccccaggacatccttcctgagttgcagttcagctgccatcacagtacttcagccccctccagcatctaggggctggctctgcttcttatcttgatttctctccctctgcagggggatgcgggtgtcactggyygtaagattattgtggacacctatggcggctggggggctcatggtggtggggccttctctgggaaggactacaccaaggtrgaccgctcagcygcatatgctgcccgctgggtggccaagtctctggtgaaagcagggctctgccggagagtgcttgtccaggtaagccccctccacccaccaccgtcctgttgcagtggaggacycctgcccagttctgccctgagtgaggggatgttggcccggtgggaaagctgcaygctttgccaaaggttgtgattgtgtgattgtgttgggcactgtggccagggctctgaaaacctaggggagggaaaaccagaatcttcagggagagaggcgtgtagaagaactgccctcggtgaagatagcaggaaaattgcaggggagcatgtggggcaagaggcatgtggtccccgctggtcccttcagaagaagggcaaagcttctgaaaggggcagggcccacacagaggcttcaatccctgacgctgcaccttgctggaaggtttcctatgccatkggtgtggccgagccgctgtccatttccatcttcacctayrgaacctctcagaagacagagcgagmgctgctggatgtggtgcataagaacttcgacctccrgcygggcgtcattgtcaggtaaagtgccatgnrctgctattacacaggaccttgctccttccttgcccagatgctcacctcacctgaaagggaggcagaaaggaggatgtttctgcctctcagaagtgggarggtctgtgagctcttggtacagcacagtgcatccccagtgcagaaagcctggttgtcaggttaaaggaggctgccccaggttcctgctggcccagtcaacaccaactccagtggggccatctctgagcaactgggaggcaggcggggatcttaggaaaataattattaatataaggccaaatagctcaaatggctgggaatcaagtcagcaagtctattccgtttctagagcttagtggtgtcaacattggcctgggccaggtaagtggagtgggaggagaaaagcaccggaaggctggagttagatcctggtccctgaacctctaagcatccgtggggctataaaacgagaccagggtatggcacagataggatgggtgcgcgcaactgcggtggggaggcgtagtgccatgcgaggagggctgtgttacagttcgttgctccctcctgtccttgaaatggagaaagaaaccctgctnctgttccatcttccaatgcccttcctttctgctggacatgcagggatttggacttgaagaagcccatctaccagaagacagcatgctayrgccatttcggaagaagcgagttcccatgggaggttcccaggaagcttgtattttagagccagggggagctgggcctggtctcaccctggaggcacctggtggccatgctcctcttccccagaygcctgkctgctgatcgccttccccacccaccwaccctcagggcaaagccaggtccctctcatttagcctgtcctgtcatcatcatggccagctggaggcaggggcttcctggtgctggaggttggatcttgatgtaaggatgggcatggtgttctcctgctgctccctcagactggggcaatgttaatttagtggaaaaggcacccccgtcaagagtgaattccctcactcgtctcccccaacagctggaccctgaccagctccccctccctccccttgcctgtgccaggtgaggtcagcacatctcaacaggcctcagggctccttgtgggcctgggctcctggacccccctttcacaggcagccagtgccctgagccagggtctccagaaagccccacccaggccaggcatgtggcaggggttagagcaggactgatgtctcctaagcacctgtaatgtgcgagggacccagytaataactgatctcgttttttcttcactgcaacatgatgaggtagtaccttttatatcccatttatagatgggggaaagcaaagcacagagagtctggataacttccacagggtcccacagccacgtgtttagacctagatgtataactaggagctttgactcaggagcctgtgacataccccctcccccaccgttgtctcatgccagtaacaggctcaaacaatgacaaagcagattcagaaatgaggccatggactctgtcctgaaggcctgaggttactggaaattaggggattaacccactagctcttgttgagccgtgggcaattgtctgaaaagtgaagacagaaccacagggctattttgtttgcttcatgtgtcccagaagatgactgagggtgagttggcttacctggcccatcagggtaggctggagttwgggactgaccagcagctttagaatcccagccccctgaccactcagagacatgcagagattgggtttttggacttctggggtaagtggtctaagtccagtccagtcctatstgggcttcctggagcagaagcagcaacttgtcctagcacagatggccagccccttagacagaggccctcaagtctttctctttccctggtcccttgtatcccctgcaggctgartgcatttggagggagtgagtggccctttcggatccagggaggctggtcctatggcctcatgttaaataggcggggcttgccttctggtgtyggacaagcttctgagacgtcatgaggagattctgcctttgccaggtgactgtctggggagcgggtctgctcccaaggggcctgagcagtccttggcctgctaaggtcttggaacttgcctgcctttccatccatggccagcagcacctsccctacctgccccacttgtccttagcctggacctctgacagcagcatctctaccttctccccagctcccaggaccacaggctcaggcaggggcctccatgggccccaggggaacactggggacttggcctctctctagggtacatggtgctgggagaggcagcccaggaagtctcatctggggagcaggcagccagcatctgggccttggcctggagcacaaagaccctggctttcattttctctcaggtgaaaggaaattaaggcaacaaaagaagcccggctcctggtcacctaggaagcctcagattccttcccatggagggagggagtggtttgcaggtggccaagttcctctaacttggctcacactcgacatgaaaattcagaattttatactttccctacyctctagagaaataagatcttttttgtcagtttgtttgtatgaaactaaagcctttatttgttaatagttcctgctaaaacaatgaataaaaactcaaggagcaactaccctatgcttagttattctctgcaaaaccccagagacatgacacctgctctgtatagcattccctggttgcccacccccaccaccgggggaagttagtatcctcccctcggggtcaccccatcctgtccacgtggagcagatgtctcatggactaggtttttcttgttactagcagctatgttaagccacaccactgccatgttcattcctcaccacatctcaccaaggtggatattcttaggaagcccatttttacatgcggggccctgaggccccaaaaagggttaggaccaaaggcagtggccacctctggctcctccctgagttctgtgtgctctccttacgcattgctgcccttaggctgcctatgccttatcytgtgcccttcctgcatggtgtctgcatgagactggcgtgagggcatgctcaggccatgtctggagtatggataagtgactgaatttgaacaaagtgaaggagtggaggggattggtctgtggagagaggagccgaacttttaagtggatgcacatttcccttcactcgtgttcagttgtgaagagaataagcaaatggttctttttcattgaaggtcatccctgccatggcccccggtgatgtggttcttggggtttgatcagagcaggaggaagatgggtcctgcatggtttccggcaagcaggctgtgtggacaggactcagctctggggaatgtcctggtgcagcctgaggcaaagcctgtgtggcccccgtgtctcacgggcagacaaagctgatctggggtgccaggaagacccagaatgtggcggggaggggaggggaggatgaggccaaagggcctcacagtcctgtttgagacagaacctataccctgagaagacactaggtgggcaatacaatgaaacatgacacattacagagaaaagcacgtttctcaagaatgcatacaaatagacacacttaagaaacacactggaatacttgcctggggtagggggaggactctaggtataacatgcaaaataattagtgaaagcaagatagagaaccaccttctgagccacaaagccaagtgtcacagtgttagggaaatgtggacggagcaaaggaggttggcagggagcggccagtggagtttgaggaaactcaggagcacagagtccctggaagtcaggtgaagactgtttctagagcaggggagccaccaactatgcaaaatggttttgatgggttacatgatgggaggcccaggactgtccagtgaattcagccacatggaggttgatgatgtgggaaatggcagagtcacatttaaacgtaaatatgaccccaaccctcacctcaatcatcctcccctgggccatctcatgacattcagagtgcgtgctgggctgcactgccctgcatgtctgtgcagtgcctgccccctaccctcatcctggactctgctccccactccccacattccggactccttggctctttggcttcccccagcaggccaagctcgttcctgctcagggtctttgcacctgtcgttctgtcatgggtgtggggtgcgctgcaggtttcagatgaaatttctgtatttccaaaaaaccccttccttgatagcctctctttctactccattccatttctagtttctttttcagtgtttaacatgatgttccttggagcctttcacttgaatccttccctacccattcactctcccttccttcttcacatgcgggtcctccaaatccctgcagtctcagctgacaagccaccctccatgatgctcccaatctcccaggaagatgctcccaagcaccttccataaatcacacccaatgctgtctccatctggtaccgggctctcaaaggttgtagttctttaaataactaaatattttcattaattattaataataatgttatggcaataattctattgctcacactctgaagatgatgtatcaacccaaataagaaagcttttttccccagcttcattaaggtataattgacaaataaaaattgtatgtattcaaggtatataatgtgatttgctatatgtatatactgtgtaataatttccacaatcaaaattatgaacacatcatcacacacagttactctcaaaggttggaattctttatggatgtcaatgcttgtttatttatacctgttgcccccataggacttggggctttccaaggtcatctggccttgtctgctgtctcatacttgccttcaatgcagggcttggcacagagtaggtgcttggtgtagcacgggtcatatcagagaatgaatttgaggtgtgtccatctgttctgcctcctgagctctccttagcaagatattctgcaagatataaggatcctgcttgccctttggtaggtcttgccaggctcagctgctcagagatgtaaatgtcaatcattccacagagctgtttttttaaagcacctgttaagagcatagcactgtgactataaggatttataccgttacrggtcacagaggactagagagaccagtatgggtgaatataggagggtatttattttaaggtgtgcactggctcagtggattcacatccaaaaagctgagccttgaacaaagactgagcaggatttttataggcaatctacagaagcaaaacaaaggcagttaatcatataatgacaggtcacataatctatagcataactgatgacttggcataacttgtggccttgcatagctggtggccttctagctgcatcaaaagaaaaaacaagaactggctaaatacagatatttgtccttttttttttcttttccttcacccttgctcctgaggtggggtgtctggagcctattcctttggtttcaacttctcgaacagcgttatcttataactgtccttgaagtgagcttgctaggcagaggaaaacttgtttgtcttttctttttaacccttgccttgccacattctgggccttggcttttacttttcttggagtgaatgaatgcagtacttattatttttaaatttctgcctccatacaattgatcactctgcacttcagttgcttcaaccctagaagtaaccgtggcatgccaatgaggaagacatctcatgtcagaggtcccagagaaatgtaatatccaatgaggggcagacacataggaggtatgaatggggctcaggaggtgggagcttggtctgaaaagtataggaggtactttggagttggcagtggatggaggaatatgggatgagagttgagtctggggaaaataattagctcagcaggggttagctgggatgaaaggcatggggtgggaactttagaataactttatgcctgtggcaaattccctagagtaagtatgactcaggcacagtgtaagaggcaatgtgacagacatctggtccctggcctatgaggtcttcttccttcctaccataatgcctccatgaggaacgtttggagaaagaaggaacaaggactgtgttctgagtttggttcatgtcggctcagatgcagaacaatgtgggtagataaataattcagtggggagaggaaatcaacccaagggaacaggagagcttacaacctcaacagtggagtccctataatatgggaggtttgtcagacactttcatgtgactcttatgggacaggatggaaatcagaagccaaataatttgctgtcttagtcttttcaggctgctataacaaaataacaaacggggtggcctataaataacagaaatttgtttctcacagttctcgtagctggaagtttgagagctgggtgccagcatggttggttctggagaggtcccacttctgggtacaaatggccaacttctcattgcatcctcacacggcagaaagagggtgagagagctggggtgtgtgtgataagggcaccaatcccatttatgagggccccgcctctgaaaggtcccacctcctgatatcacattggaggttaggatttcaacatctgaatttggggggacacaaacattgactccataacacttgccaaatctgatttcttaaaaatgaaattcttgtgcattaggaaaaagccacaagtaagggtaaaagataagtgacagagtagaaaatatttgaatggagtgaaccgcagctcaataagaaagcaatacaagccccagtaggaaatggaaaaaactagacggataggaataagtaaatataatcaaagaaatggagaaagtcaggagaaacaaaggttgctcaattgtacttgtttcaaaaaataaacactttaaaaaatgcaacattgtatttcggcaaacagatggcgagaaaaaaaaaagaaaggaaagaaaagaaataaataaaaagatttgaagacagtgtggcgattcctcagggatctagaactagaaataccatttgacccagccatcccattactgggaatatatccataggattataaatcatgctgctataaagacacatgcacatgtatgtttattgcagcactattcacaatagcagacttggaaccaacccaaatgttcaacaacgatagattggattaagaaaatgtggcacatatacaccatggaatactatgcagccataaaaaatgatgagttcatgtcctctgtagggacatggatgaagctggaaaccatcattctcagcaaactatcacaaggacaaaaaaccaaacacctcatgttctcactcataggtgggaattgaacaatgagaacacttggacacaggaaggggaacatcacacaccggggtctgttgtggggtggggggcgatagcattaggatatatacctaatgtaaatgacgagttaatgggtgcaacacaccaacatggcccatgtatacatatgtaacaaacctgcacgttgtgcacgtgtaccctataacttaaagtataataaaaaattttaaaaaaaaaagaaaaagaaaaaggtttttaaaatccagggctggcaaagatataaggaaatagatatccccaaacacagttgatcggtataacttggtacagactttctggatgaaaatatggttcttcttgaaatgtaaatgtcatgtctgcctagtttgaccttgcggtcagaggtggcatcaagatagagacaatcgctttgctcccaggcctaggggacagaaccccaggagggcaaggtcagcgtgtgctgaatggactgggggatggggtgggtggatcttagggaagcatccattctgggccaccaaagcagggcttctctcctgccccagggttgaggtggctgcctctggggtgtttgcaggagtgcccacagaaaggccctgggacacaaggcctggctgggaggagccccctccttcacaggccaagactgcaactgcggagccagtcacaacagcctaagaggacaggaattcctttcctcggaggctgtcagaatcccaagtgaccaggaggaaacaggctctggcaggggaagacactttggaggaccacccactcagagagcagattgtgtccgtgggcaggatgggagctaagagtgggagccggctggatctccctccacttcctcgagatctgcccaggacactgcctggttcccgctgctctggagggactgttcccgggctgtgaagtcctgggatcccgctgttcctttagttctgaacagtgtattctccagcaggaggggcagccctggactcccaggctctgtgcaggcttcccagaagcctctctgggaggagtggggcccactgccttccacttcccgtggcagcccctggccctggcctcctccagggctctgcaaccctcttcaggccccctggcatggtatccatgccctcctcgggagagtaagtggggtgggatgaggtggaggcctcgacctgtatagacaacccagggctgttccatcttcacccttgggcgaaaagtagcccagcagcagcttcagggccccacctcccaacccccaccaggccgaccccr

SEQ ID NO: 95085 - DNA, 96065 bp, Homo sapiens
ctttcccaccctgcacttgcgtttgctcaacccaagagtcagtgcctcctcactttttgcactcaaggcacatcccttgtctcaccctaatcccagctctatatcaccaactataatgcatccattatgacctgatggaaagagcgtcagccacaggaggagggaaggggtagtagtagattatctgcagagacagtaacctaagaactaattagggaaaatgaaagaagtcattgcataaaagtgggatagcaacgattaagactggtgacaggaaaagaagtaaaggatcagatatgggtctaggtaaacaggatgaagccaaacagcttagaacatggtgaataaaacacggattctggggcctgctcttaacaggtgctggtagctggctgggcaagacaatagaactcttgactttatctcagcctattttcaaagaatcacattagaaagtgtcctggtatggggaagggagagaaaaatcagaaaatctctataacatacagaaatctgtatattaattttttcaattctgtgaaggcttcttcttacgagatttctgaagttgggccaactaaaatttaaggacccttgaatgactattatctttgctgagagagggtgtatgtcaaattcaacaaaattaataacctacatttgtgtaatgtcttacaggttatgacgttctctgatgccgtctttttaaatctcagtcatttctctttgcttttgcccatttctgttcccatttcctaaaactctttcttctagccttctggttgacaccaatttttttaaaacagctgtattaagatataattcacataccatgaaattcaccaatttaaattgtacaattcaatggcttttagtatattcaaagttgtgcaaccatcacgacaattttaaaacatttccttcaccccgaaagaaatcctggacccattagcagtctctctccatttcccacactaacctccctagccataggcaaccacaaatctacatcggacrgggcccattctggacattaatttttaatttttatttgaaagtgcccctgtaatcccagcactcttggaggccaaggcgggaagatcacttgagcccaggagttagggaccagcctgggcaacatggcaaaaccccgtctctacaaaaaatacaaaaattagccgggcgtggtggtgtgcacctgtagtcccagctccttgggaggctgaggtgggaggatcacttgggcctggggaggtcaaggttgcaagtgagctatgatcatgccactgcattccagtctgggtaacagagtgagaccctatttcaaaatgaaaaaaaaaaatacagaaagaaagaaagtgcccttggggattaggaattcttacttttggaactcctgacccctaaatggtggatatctgtgataaatcagagagctgtgacagaaatggggggggaaggggaaacagtatttatttaacaactactgtgtactaatgtgtatcattactttcataaccatcctgtgagtgagttatcatttagcagttgaataaactgaggtttatagaaattatgtaagctggcttggtgtggtggctcttgcctataatcccagcactttgggaagctgaggtgggcagayagcttgagctcaggagtttgagaccagcccgggcaacatggtgaaaccccacctctaccaaaagtacaaaaattagccgggcgtggtggctggcgcctgtagtcccagctactttgggagctgaggcaggaggactgcttgagcccaggaggcagaggttgcagtgagccaaaatagcaccattgcactatagcctgggcaacagagtaagacactgtctcaaaaaaaaaaaaaaaaagaaaaaaaaaagaaaagaaaaattatgtaacctgtcaaaggttataaagttagtaacaaagtaagattataaatctttgttttctgactagagcttattcatcttctttgcacgagaacagtggttctcgaactttggtgggcatgagaatcacctggaagccttataaaacacagactgtggagctccacacacagagtttctgatttactagttctggggtggtgcttaagcatttgcattcccagatgctgctgctgccagtctgagactgcactatgttgtgctgcctaacagtacctgagaatgtaattgattaaggtcacagagctggatgtgactgattaaggtcagagagctttaacgtcatccagccatcttttcagaacagtacttatgatctgacaaagcaactgctgattgataaaaggtggaaagtaattagaaaggtaatacagagaacgataatactttggatacatgatgaagtgtgataacatctatttttctggctggggaatgagataaacaaatagagaactgatcatggtgcatgaagcacctagagaaagaacatttcagttgggtgcaaaatgtaacgttccttgtctagttcagaactatggctactcaaggggagaaggcaggcagacaaaggactgtcaacagcaatgtctcttattgttctttggctacagctgcacttgcatactcatgctgacttcgtgcccaaatgttaactaggccagaacttgatcagactgaaatctgtaaaagaaaaaaaaatcatcacagataccaagaaaatgtatttccttgaatctgttctaactctgaattttgttaaaaaattagattttttttttttttttagtgggaggaaaaggaggacagctcaaaaccacttaattcagaatctgcagtgtaattgttatggtaggctcaaatgtgatttgaacatccctagctatgggatttggtgaccaagctcccaagagaggatgacacagcacagggaatagcacaggcagcttgccttgctttgtagggggcagagatgtgaaagtccttgttgaggtcagtggagctgagagtactcttcataatttaaatggacacgggtaatttccttacatgtaggcaagccagccctagggataggaaggagaaagaaaaacagggagtacagaatgcagatggctgccctctgctaattaggccttacctttatatagaatgcttttgattttttcagacactttcaggtatattaactcatgcacagaggtcaaatattattattattaaacaaagtgcagagaagtattgagaattagctcagttaatgaattagctcaactaggtaatagatgcattaagattagatggggacagtcactctggaatgccaggaaaacaaaacattcagaaataagtatagtaaccacattaatacaatcaagggaacaagcctttccttccaaagtgacggaaattaagtttacttgttggtgtccttacttccatattcattcatttgttcattcatttatcatgtattaaatgcttcctacttgcttatcattctgctcagtgggcctgggggatgtagaaatgagacattatctcttttcatttgttgaggccctacaaggtgccagaaccgttccaggcgttggggatatagtaattaaaaacaaaacaaaacaaaccaaacaagaaatgtataagccagtgtggagtaagtcaattaaaattaacaaagcaaaaggaagtaagtcctataataaaaatgccttgatggatagagggatgggtagatgaccagttatgttttaaagcaagtatatatatagtacgatgttagtgatagagtctaggtggtgggtatactggtgtttgctgtaaaatctttcaactgtgctcgaaaatttttatgataaaatattatggaataaacactataggaatgacaaggaagatgcagatttgagaaaagtttatgaaagacatggcattctttttttttttttaagagacaagtcgatagaggagtgcaatggcatgatcacagctgcaacctcgaactcctgggctcaagtgatcctcctgcctcagcctctggtgtagctgggactacaggtgtgcactaccatgcccagttaatttttgtactttttgtggagatgggggtctcattatgttgcccaggctggtctcaaactcctagcctcaagtgatcctcactcttctgcctcccaaaatgttgggattacaggcatgagccaccccactggcctttggcattcctttatcctcctcctcttctccttaactacctaatatccccatgctaacccttagctgtaggttcaacttccaaattccaatgggctataaagagttctacaaaagtccatgatgactaataaatctatctagtagagaaaagaccttttggagaagaggctaactctaggaccacctaaaactcacccactccatagctatttggtaaggcacccctttaggaaacttcacccaaatgcctgcttctgggtaccaggtagtggccactctccccatctttgtctcctgtctgagctgctaccgagtttgatgttagatggtgacataaaatacagtaattcctagatatatgcggagggactggtcccaggacagcctacatgtaaccaaatccacacatgaagtcccacagtcagtcctgaggaaactgcacaaatattgtgttttccatctgcccttggtttaaaaaaaaagctgcataaaagtgaacctcacagtttgaaccagtgttgttcaagtgtcaactttaatttaaaagtgaaaaaagtttgttttctctggtatccttttttttgttttgttttgtttttgtttttgttttttgacacaggctctggctctgctgaccaggctggagtgcagtggggagatcatggctcactgcagcctcgatttccctggcttgagagaaaattatttttttcaaaataatcttcaatttaaggtaatttactaagtttcaaaagataatgctattgacgtaaattctgttttagattgtaggccccatcagctcattgatactagtcccaagttcacaggagaagagactggaagttactaggctagtcctgcctctctcaggtgtgtcccagcaaaacttttctttccagtttcagcgctttagaaaccttttctcttcaaacactaatacagggcctagactgtaccagcactgttctgagaactttacatacactaattcatttaattctcacaaaaatcctgggatgtaattgccattattattcccatttaacagataagaacactgaagcacagagagattaagtaacttgctcagggacctggatgtgaatgcagaaatctggctccagaggtggagtctgaaactgcctttctaagtgactgattgccaatctctggaaaaccgttcaattgaagatattaatggatcaaaatgtcagtatgttttcagataccctaactccataggaagctcagtgtatgggatgagatactgtggtttagaagggaattgcttttccaacggagggcacccttcagataagcccctcaaattgcccttcactagagagtcgcacgaggacaggcctgctaaaaaggatggcgctggggggtttccaagacaggaaatatctaaagccagcggctgacatattatcttggcgaacgggagaagggaaaaagaaccctcattttttggaaacacaagtttttagcctggataatgggtaaatgacattaactcttcgttccacactaatctttcaagcttgttcaaattttgcttctcaaacctgggccattccttcttatctaatctgcctattatttccttcaagctttttatcccttctgaaaataggtggtagcataccaaattaaaatacagaacagcctgtttctttcccccagggtccactagggcgcgtcggagaaagggttaaccgggcgggtgggagggaaggtcgggctcacacctttcgcagagacctcgggcggcggcggggcccgggaggggcggaggctggggccagacgcctcgccgcctccgcctcggcgaatagcagcgcgctgcccgcccggattggagcagcagcatcacgctgacctctgcctgggatgtaaaccggaccagccgctgcgggcaaaggaaggctcttggctccttcgggaaacccagccccgtcaccgggctccgagcggctcgcaggcgagcgacagcggcctcagccccggcagcgcccagcggcggctgcggaaagcggagggagtccgacgcgggcgcgggcggggagcgtgcgtccgttcgcacaggcagcgggaggaggggcggcgcgaaccatggccggggacagcgagcagaccctgcagaaccaccagcagcccaacggcggcgagcccttccttataggcgtcagcgggggaacagctagcggcaaggtacggcggggcccggagccgcgctcccttcccggcttctgtccctgggcggcgcatgtggccggcggccgcgggccgtgtcagttgcggcagccaccgcgtggcccgcgcgcctccgctcccggccgcgctccagcgccgagtgcgccccgcgcggcctgggggcgctgcggcgggggcaggcgaagactcgggccttgggggttccgggggtacgcggccacgatcgcagggcgggagtgctcctccggcttttctccccccgcgttaataactcgtggccggggtcctatgggggaagggcagggaagcggatgcttattgttttgcaactccagtgtcgggggagagggctttccgcaggatcccccactaacccccgatggactccctcaagccccggtctggcacagacgtgctcgccccgcggcgcagcctggtgccgagggcggagcgagccgggaagcgcggccgagagggcgagggtggcgggaacgcgcgaggcggcatcccggggaaggggagcccagtgtggggctgcacgcaagggctggggattacaggggtttccgggtaaaagtctgagagccaaataggtgccgtgacatcaatgaaacgataatagtaggggcttctgttttttaaggttataagaggaaacgtggtcggcttcaatgagaaagttgtactggctccaagctcttcggtgtccaggacgtacgcgtcttggatccacggaagggggtcatcgtatgggtgtctgaccctcttaggagcctgtttcctttgttttatcmgcaaggcaaggagagacaagggaaatgacttcctagctttaccckgggttttttctgcaggtggagaagggtggagtcctcccagatggttctttctttgctcccctaacagcctttaagatgtggctacttgtttttcccaccgtttaacaccctccaacttcatttggagcacgggttcctcaagggatcctgagagctgggtgctgggtgctggtttggagaggcaggatgatgcttctcccggctggggagagcagagcaggaaggctggttggcgccatgaggaaagagccacgaggttttagctcccgaaccgactcgtcagtagcccctcctccatgttggttttacatttttccctcctggtctggactactttagcgcaaggagcccagccagacacggcggctggcgctgctggacttctttattgatgaagttgatctcgtccgtagctcccggggttaggaatcggcctgctttaggtcctgaagtttctgttctgtgtgctccctggttgaaggcttttaaaaaaatttgtaatttttgagtatgttctttactatgacttatactagtaattcaaagcaaaaccagaatgctagcccttcaggaagctttacctgttcttttagaattattcttgctcttctggcatattcctgttggattgggagcattttttgttgttgttgttcatggctgttttcccagccctcctagcacaatgcctgcctggcatgtagtggggtccaaattttaagctgaagtccagtcctcctaaagtggggaggaggcttaaacttgcatatgagcttttagaaacaaaatgatcttggtaatcatctgaataatttagttaccacgagggtgaaaactgcgaccctaaaaggtgaataactctgttattgttcttcttgtgtgtttctcagtcgtcacctgttctaacttgataatcaagcttttggtgttacttgggtaaagtgagggatgggatagtggtgagccaatgtgggagtagctaattctctgctatttttatccaggaggaagagtgtagaaactctcaagaaaggaagggtccgtttttctgcagttttcaaagcatgttgtacatttttatttattaatttaatttttgagacaaggtctcgcatttccacctagcccagagtaagtggcactgtcacagctcactgcagcctcagcctcaacctggagtaactgggagtacaggctggcactatcatgactggctaatttttttgtttgtttgatttgttttgtttttgagacagggtctcactcttttgcccaggctggagtgccgtggtgagatcttggcttactgtaccctccacctgttgggctcaagtgatcctcccacttcagcctccagagtagctgagactacaggcttgcaccatcatgcccgactaatttttttttttttgtagagaaggggttttgccatgttgccaggctgatctcaaatgcctagacttaagtgatccgcccgcctctgcctcmcaaagtgctgggattacaggtgtgagccactacctgggctggctttttaatctttattttttttattattttttttttttgagacagagtcttgytctgttgyccaggytggagtgcagtggyrygatctcrgctcactgcaagctccgcctcccgggttcatgccattcttctgcctcagcctcccragtagctgggaytacaggtgcccgccaccacgcctggccaatgtttttgtattttcagtaaacacggagtttcactgtgttagccaggatggtctcaatctcctgaccttgtgatccgcccgcctcggcctcccaaagtgctgggattacaggtgtgcgccaccrcgccggcaatctttattttttgtagagactaggtcaccatgttgcccaagcttgtttgtacatttttgacatacgaatgattgatagtttgtcatcctttaagattattgatatttttgttattaaaaaagtccaagactgggcctggtggctcacrcctgtaatcctagcattttgggaggcagagacaggaggattgcttgagcccgggagtttgaggccagcctgggcaacatagtgagaccccatctgtataaaatgaaaattgtggtgggtcgagaaagttattttgacctatgtttaaaaccagattctcagcttgggcaacatggtgagacttgttctctacaaataataaaattatccaggtgcagtgctgcaggtctagaggctgaggtgggaggaatgcttgagtatgggaggtcgaggctgcagtgagctgtgattgtgccactayactccagcctgggtgacagagcaagacctgtctcgaacaaaaaccaaaaaaggttatggctgagtacggtggctcacacctctagtcccagcactttgggaggccaaggaaggaggatgccttcaaaaccagcctgggcaacagagagagaccccgtctctacgaaaaattaaaaattagccatgtatgtgccaccagcttctcaggaggctgaggcaggaggatggcttgagcctaggacttggaggctgcagtgagctttgatggtgccactgtactccagactgggcaacgtagcaagaccccatctcaaaagcaaaccaaaccagattttcatatttccccctaaaggacaggtgtaataacactaaaaggtggaaaaaaacccaggctaaacttctttgcctgcatacatatctgtgacttttaggtgtcattctgtttccttttcatctttgcctgttccttgttctgtaacctcttcattggacaactaaaatagcctctgaaacgagaaaaatctgctccattacactgccatcagagtggtcttccttaggaatagctctggatgtgccattttcctttttggaaaccttgggtarctccccactgctcagtacaggtcaaacacttcagtacagtacaaatccccttggcccctaatatggtcccaggctattatttttattttttattttattttttattgagatggaatctcactctgtcactcaggctggaatgcagtggtgccatcttggtttactgcaacctccacctccygggttcaagcaattctcctgcctcagcctccygagyagctgggattataggcatgtgccaccaggcctggctagtttttttgtatttttaatagaggtgggggtttcaccatgttggccgggctggtctcgaactcctgacctcaggtgatctgcctgccttggcctcccgaagcgttgggattacatgcatgagccaccgtgcccggccttatttttctacacagccaaatgcacacagaccatcttactgaactgtcttcacttacatttttgctcagtggtcttctttttgtaatggcctttagtctttttaaggctcagctctgttaatactttcttgagggagctttgttacccatttccttaatgagaattattttttctgtcttctgcttccatagacttaccatatctttcttgtcttatgcttatttgttgactgcttcttcccgtagagtatgtgttctgtgagagaatactttttcttacttaacctgtttaagtgcttgggattgaggggaaataaggatttaagaaaccatgaaagaaggtctctgtccttagcagtttactgtttataaatttcttccactgtgtttattaccaagtcactttatcattaaagcatttgattatctattccctttgaagtcaggcatgtgtcttccctactggtagatgacaatggaagatgaggttaggggaacttttgacttagtggtaggactgggattaggatctagggttttattttttatttatttttgggacagagccttgctctgtcacccaggctggagtgcaggggtgcgaactcggctcactacaactcctgcgattctcctgcctcagcctcccaagtagytgggattacaggtgcccaccacaatgtccggctaatttttgtatttttagtggagacggggtttcactgtgttggccaggctggtctcatcttctgacctcatgatccgcctcagcctcccaaagtgctgagattacaggcatgagcctctgtgcccggccggttttttttcttaaaatctgtacctgttttgaactttctccacaagcagtggcctcttcgtgtaaatatttttagggaggttggcctgtgtgtgaccattataggataagagaggagatgctgtcccctctgaggtgtggactgccacctcagtgcagcttggccgtgagtcagcatctgcttttggaatgcttcagaatgtgctctggacccgtgtcggcgcccactgctctgttctggaaccttggtcgccatccccatccagccagatcacgtattccacaccttcctgtcaggtgttccsaggactgtggggctggtttggtccttttgctgcttttctcagagatggcattgtgtgttttccgtcacctcaaactgctgccatgatctggcccttcggaccttcttccctttcccccttactctagctagtccagccagacccactcttggcatggcaggctttccccsagccaaggatgtccgcatttgctgtctgctctgcctgaatctctcctgcttgttcactgagccatgcctagcacgatgtctggtagaatgaagaagaaaccctgggtcctgctgcctccagtagttcctatcctgctgcctttcctcaggctgtatttcttctttgttccttgagtgtctttgaagtatggtttctgatgctcactctgtttgtggtcacctaccagttcactacatagcatttgctttcatgtcatttctttgtcaaatcttgcttttatgaggttctgtgatggagacagattgtctttgggaatttcactgctgaagacctgaccttttttgctagtgggctctgtgatggtgctgttggaactacttaaggtctctaaatcttagacttgtatttcagtattttaaaatcaataaaaaggggttgagagtatacttttatatgtgagtgtgtatgcatgtctgtatgctttcgtgtccattaaaccatttcagtcattaagctgatttgtcatgaaagcattcgatcttttcatcatatatataaaatatrtaagtataacccatatataattatgacatacaaaataggaataaaaaatgagaaaaaggaaacatttagaaacataatttctttaatggtataaaatcttttgatactaaaatattttttatttgtgactgaagattgaaagacgttttatttttaaaaatcttgtttaatacttggtgagtcttggatgaccttggtggtgttagttttggtggtcattcaagactgaaggttttgttctaagtttagtcttctgaatttttatttaatgattatcatatttgaaaaagttacctctaaaaagatccaagtagaggaaagtcatcattttgtagtacttactaaatcatgatattcccatcctccagttatgctatggcttttccttaaaacgagctagaaaattttcatcctgtagtcccagctacttgggagactcaagtgggaggattgcctgagccttgggaggttgaggctggagtgagccttagtcccaccattgcaatccaacctgggcaacagagcaagaccctatatcagaaaaaacaaaaaaagtgcaattagtagacaatttaatagaataacctgaaaaatataaagaaccatataaagccctccagcattaggctttcaggcctcataagccataatttgattggatgagggggcagtggttctaaatgtatgcctgagaattttgaacaatgacagaaggtgacaactctgaaaaattcagtttgctttgccaactcgctattggcaatactctttccataacatgggtttctttctttctttttttgttttttttaaagcagttgtttttacttggtttctccctgtgaaactacaggaaaagtgtcagtatttctgtgaatgcctacacttaaccttcagtaccctatgggacaggtgaccagcaggcagtactttttcttcctgtcccatgtagtgtttggtaagaattttgcctggtacgtacatggcagaaacataacaattttgtgtgggttgtagagttgtgcttctttatttctttattcagcccataagtatgctatttggtctgacatttttaccttttttttggctgactagcagggagcaagggctgttttgtcatctcagctagcatgctctgctttcccttgcctgtcctctagaagtccaaagttctgtgtttctgggattgcttttccctgggagtggagatgagcactgtctttgcccttcgcaggcttctagtctcctaggctgtctagagaaagcttgtgatagaatgggctgataacagtgctgattttggactatggtctaaaagacatttttgtattcataaccgctaagagaattctggagaattcttcatcccattttgcacatataatatatatatttttatatgttgtaaaaatatgtatttttaaaattagttattattattattattattatttcagagactgtgtctcactatgttgcccaggctggcatgaactcctggcctcaagcggtcgtcctgtcttgggctcccaaggtgctgggactacaggcaagagccactgtactgggccccatcacatatttttgacatcagtttttttcattataaataaagagttgaaaaggaagtgatttctgatatattgtaaatatacacttaaaaacaacaattgtttcattattcttttaaatgtatctgatgggctctaaatctataataatttgacctattgtcatacattttaaaacatgtagatgaacaagctcttatttgagtcagaaatgtttatttttcttttttcctcaatcatatttcagttccacttcccctgcaaaatattaatttaatttcatttatttttatgcttgaaaatattttattggtcgttctatcacacgtgacagaagtatacattaaaattttatttcctgttctcatgaatctaagtatttatttcttttcgattgcattactactgtacttattagtataaaattcatcaaaacaaatggatactgccgggcgcggtggctcatgcctgtaatcctagcactttgagaggcctaggcaggcagattacctaaggtcaggagttcaagaccagcctggccaacatrgggaaaccccgtctctactaaaatacaaaaattagctgggcatggtggctggtgcctgtaatcccagctactccggaggctgaggcaggagaatcacttgaacccaggaagcagaggttgcagtgagctgagattrcaccactacactccagcctgggcgacaagagcaagactyygtctcaaaacaaaaaacaaaacaaaaaaaacaaccaaatggatatgttatacatttttttgaagaaaacatcttgatgagatagagccttccacccccaattatttgatgattctgtggataattactatttaatactagaataagatttttcatttgtatagatctaagctttaaggaaccctgttgacataaataagtagatggaaatggacagaatattgttatatgaaggtcacttagactcagtttttacctttaaaattatatgtcaaaatacagtggattttttgaatcaactagcttgccattcatctcctctaattttgtagaaagcaggaaaactggaaacctccagacttgtaaaaggaattgttattcagtcattaagtcattcatcttccagtatcagctcgagtattttagatcacctttttgcatggattcagagtggaggggtgatgggcctttattttgtaaagtgggagaagcctgattgtgaaaaagtatgcttgctttcatgtggctcaggaagttttcatgtaccctagtttgaagacaactgatttaggtagcttggtgtcttagtctgttttgtactgctatagcagaatacctgataatgaacagaaatttatttcttacagttctggaggctaagaagtccaagattgagtgcctgacacctggcctttttgctgtgtcatggtcatcccgtcctggaaggcagaagggcaggaggagaggagggggagggaagtgcctgtcctcgtgcacaaaagtttcaaacaagaggttccttttataaggaacccacccctgtcataacgaatctgctcccacgataatggcattaatccagttcatgatggtggtgcctccaagatgcaaacacctcccatcaggccccacttcccaacactgccacattgggcatcaagttttcaacacgtgaactttggaggacactttcaaaccacagcccttgtgttccagcccactgttgccacttacttattaagtatctgtatattcatctacagaagagggtccttacaagcccttacattttgacagttctgtaactagccttgagtatcctgtaattgttaccactggtcacacaaagtacttcttgaatctgaacctgtgtaagtggtagtcatttgtaagctttctttggtggggttctgaaagactgacatcccctgccgtttgctaacattcatctcaactggataccagttagatttcctgaaggtcctgggacccttcagtatgcttactgtcacttttaagcctttgcaggtgttgctcttttgctctttttggggcctcctcttctatgttgccaaagcatcctaaacagacctcagttacagaatttttttcccttgccctgtgtggtccttgcttgtttagtctatcttctctagactgagctctcaggatcagggactttgttttacctcactattgcctgaagctaacaagtgtccaaaaacgggaaggatgaggaggttctcaaatgtttgtagaataaccaaatattaagtaattttttttcaaactctgtgtatcataggaatctcaacatttccaatattgaactcctcatctcaccccttgaacgtgctcaatctttaacctcaccatctcagttgatgacagcttcatctttctagttgctcaggcctaaaacctcggggttatccttgactactctttatttcttctgtagcctctcaggctgtctagagagagcttatgaagaatgggctggtaagagtgttgacgttggactgtagtcttcaaacatgtttgcattcataatcgctaagtgacttggatccattcccttaggaaatcctgttggccctgccttcacaacatatctgcagcctgagcacttttccactcctttgcttctaccctggtccaggtcatcatcatctgtcagttgcatcattgcagttgtctcctgacccatctccctcttctttctttgtgtacacattctattctcataacagccagagtgatcccgtgaaaatgaaagttggataattccctgctctgatacaaccctgcagtggcttcccattttactcctagtaaattaagtctacaacaagatcgggagggccctagaaatgcatcctttgcactggctgttcattctgccagggcatctcttgatatcagtatcgttaaccaccttccctccttcaagtgttgctcacgtgtctccttctcatgatcactctatttaaaattgtaaacattagacactcaaatatctgttgaatggttgaagaatgagttactttgctcagttactgcttctaatactagttttaacattaaacctgttgctgggggatgtggatagttgtccctttgctgttcacatttgtatttcctcttggggtaccatcacctggataagattgctggcacattgtcagtcactgagcttggtcttgtaagtgtgcatgctagatggcttaggtgcctgtttagtggtgcattaaaaaaaatcaggctgggtgcagtggctcatgcatgtcatcgcagcactttgggaggccgggatgggcaggtcatctgaggtcaggaggtcgagaccagcctgaccaatatggtgaaatcccatctctactaaaaatacaaaaaktagctgggcatggtgrcgggtgcctgtaatcycagctactcgggaggctgaggcagkagaatcacttgaaccagggaggyggagatttcagtgagccgagatcgtgccactgcactccagcctggatgacagagcaagacttcgtctcaaaaaaaaaagaaagaaaaaatcagagagtgactttaacttaaacttttaactttaaattcgtattgtcaagctcttaaagaactgtcacctattttgtttaactcaatgctttttttttgattgaggtaagatatgctttttttattagtcaatggctacatttttctctacctccttttgtagagaaagtaaacatttgagagcagaaggaatagaatattgagtgatacatagtgtttgaacaagagaggtagtgaatactcttcaggaaggaaatgcaagctgagcgagccctccttgtctgactacagagggatgacagaagctgaagtgggcatcagattggccatttgatttctggaggaaggggtcaggagacatccattgttaaggtggaaaagcttgtgttttagacctgtcttctgggaagaactcagtcctagcctgccatgaggctcttcttgctgggtcttggtggagtttaaggtgtttttttggtgtgatagaattgaagctttataatgtgtccacttcaagttaagatagagaatccctggtttgttcagaagatgcttccttgttgaggtaagcccaggaagcttgatggagtggagaacgtgcgtgggttttggagtcagccaggcttgtgttaacatccctatttggccacttttaatctgtttcttctgaacctattcctrcatctgtgaaaaggagatgatgtctggtttggagaggtgttagggttaaacgataaaatgtatgcagaggtatatacatagcaatgcttctgcagtgggcsggtcacttgccggtaccgtgattcatgttctgtgcagatgtgctgtcagaacaggctggttggccagccttcccccacccyggcccccgccccagacagagtcctgctgtgctgcccaggctggagtgtggcgcgatctcggcccactgcagcctctgccgggttcaagcaattctcctgcctcagcctcccaagtagcygggactacaggcgtgtgccaccatgcccggctacttgttgtatttttagtagaggyggggtttcaccatgttggccaggctggkcttgaattcccgacctcaagttatcccccggcattggcctcccaaagtgctgggagtacaggcgtgagccactgtgcccggcctggtcagcctttaaaaatgtttttaaatagttattcattgattttaattgacaaatgaaaatatatttatggtgtgcccattaatgttttaatgtatgtatacattgtggaatggttaaatcaggctaattagcrtatctgttacctcacttagtcatttttttgtggtgagaacaattgaaatctactctcttggcaattttcaagtatacaatacattgccattgaccatagtcagcatgtggtgcaatcgatcccttgaacttgtccctccagtgtatctttggtcagtcttgccgtccagttctagccagcactgctccctggcatctgtgcctgacagggtccaggaatggaggcattgatagtgataaggagcctttatagtttaagtcccactgactaatgtgagttattacttctttgctgataagacccatagctagtcagatattgggcaccctcttcctgggtcgacctttgaagtttcttattcttgtcttaccagctttctgtaggccttagcgatcctttcctgtagttaagttgtgcctttttcctaaaggagttaaggtctcttgttttgtagtaggtagttagggggagaaaaaacagtttattagcatctttttaaaaaaaccttttaattactaatagaacacctagcaaaatgtataaattctaaaagcacggttcaatgaattatcrtatggtgaacatagattattcccagcaccacagaaagccctcccattgctacctctcctatcaactgtttcttgataacctgctagaggcaaggtagtgtttgaccaatatctgtgtgactctagtaacttagccttgtacaggagatatatatttgtgtgtgcacacgtakgtgtgtgtgtgtgtatatatatatatatataaaatgaatataaaaatctccatgatcctagcaaaatcctactgctgctgctgctgctttttttttttgagatggagttttgctcttktcacccaggctggagtgcaatggcacgatctcggctcactgcatcctccgcctcctaggttcaagcagttcttgtgcctaagcctcccgagtagctgggattacaggcgcccrccaccacacccrgctaatttttgtatttttagtagagakggggtttcaccatgttggctaggctgttctcaaactcctgacctcaggtgatccacccccaatcagcctcccaaagtgctggggattacaggcgtgagccaccgcgcctggcctgtactacttctttaatccaggtcacaaattgcagtttttgaagcttccaccccttcctgctcctgaaagaaaaggtccatgtcttcgttcattcagccattcattcagtaaatatgtgttgattacttatagtgtgtcagacacttgtgaggtgctgggaacacagcagtgcattagagaaaggccctgacctcagggagcttgtatgtttaggtctgactcatctgtgctaacccagtgcccagtgtcatggttggtgtttttaagcgtctgccaaactgaattaagtagtactccctttactggtttcctgtagcagtcattctctkgtgtcatggttagctgtttacacctctagattccaggatcctgcagtgtcagttatccctcttgtgtccccagtctcgtgcacagggagggcttcagtctgattgttgaaagtatgctaaataccaagtaaatgctacagtcataaagtgttgtcgcaggtggagaggagtcagaaagtgttaatgactatgctaaagcttttcttgctaaagtcaccagtaatcacctagtctctaaatcccgttggagctgtagattctttaccttgacttttctgtaacacttgacagtgcccttgtcctctgggaaacttttcttggtttcactgctcttggctggttggctttcttcactctcaccattcttctcagtcatctctgggcccttttctgcctatggctgtgtcatgcctcagaatccccttcttgattcmctgttttttccccctccatgttctgtattctccatttgtcagtgcttcgcagattgggtatttcctgccttgagtcctttcctgggcttctttctcatttattcagctgtcactgggcatttccacatcatgttcttcaccaatgattatccagaatgagacccctaacaatacctgcctcctgttcctagccacagrcctgctgctctacctgtattttctctccacacagatgtacaagayagaaaccttacagtcatctctgtcactcctgcacttccacattctcccacatccatcctgtctcctggtgcagtcaatcttgctttctgaatttctcttgaaataatttctcctcccaatccacatccatatttcttgcctgggtaactctccactgactgatttcccagctgccaatctggaccacctccaaaacattttccacattgctgctggagtgatcttttaaaaatgcaactccgatgttgcctgtccgtcgggtacattcttcaatagctcttctttgccttcagtcttgctgtcatcctgttctcccagctaagccacaggaggcttagtccctccagccttgcttyctgtcactccctctttgccttatcggtcctccccmaccctgagttgtcagcacttccagttcccagctcttgagagctcacctccacactagtgcacgtgtgttgatgctgctgcttctgatgtgcctcttttgtgtggtcacttttactcatccttcaaagacctcttgagctgtcacttcccctaggaagtgttctgtcagttgactgcaatctgaattgaggtttgcatcctgtgtttttttctctgacaccaccccatactgttctcttctcagtagactgagtttcaggtcactgtctttatctctgtccattgtgcctagaatattgtagctgctcaaacatacttgagtgaatgtattcaagtcctttttttttttaaaccatgattgtgagattggattacctgggagttcatctgggtcttttttgtttctcattctcatgtcagaatttaagatttgaaaactgaatttcacatgtatagttttgggaaaagtcatctttaaatgaaccctacatttatggcaaaaattagggacaggactgagtttcaagaagtcgttaggccacaggttttttgagggatggcacaggcttttaacttactaaaaaggacaacttttggctgggattgatgactcaatgcctgatgactcaatgcctgtaatcccagcactttgggaggtcaaggkaggaggatcacttgaggccaggagtttgataccagcctgtcaacatagtagaaccccccatctctacaaaaaataagtaatgagccaggtgcagtggcatgcacctgtagtaggagctactcaagaggctgaggtaggaggatctgtggaggccaggagtttgagggtgacagatggagagaccctgtctctaaaaaacaggagaacaacctttatcatactttgccactttttattcttaatcagaagtaacacatgttcttgtaaaatgttgatttaatactaatggagtgcctactgcaactctcttgattccactgccttatttttttcttatatcactaataccatttgaaataattttgcacgtgtttattgtttatctcttttcaatgtatttcttttggtaatagctaatacttcccgagcactaactatatactgagtgctattctaagtgttttatttgtattaatgcctttatttcctctcacagccctttcaggtaaggtactataattatccccaatttcaacatgggaagactgtagcaccaaggagttaagtacccactgtgtatagagtgccaggtggggctggcatttaaactcttggcttcagagtccaaaaaacctactctgctctattgagtctcagtgcaagcctgaaagggcacgtatgccttctcctgcagtgcctgcacctagaacggctccctcctcatagttgacattcagtgtggatgaacacgaggtattccaagtaagaagtaaaaataaaatccttcagcacctgtggtactgtgatataataagaaatatgtgtttggtctctgccccctcattcctggcacagagctcctaaaaccctgtggataggggcactaggagaacctcttgttctaatatgttcctgacacagagcaccctcaaacstttgtaatttcctgggtgataacagagctcctaaatcccttagaatttcccaggtgataggagcatcttttgttctaacaagataactgtggtgggctcctggatagccaggatggtggctggttgctaagggaacgaaccrcgtgattacggtgttagaactttcagccccatgcccctgacctctggggaggtgagagggagaggggggctgaaggtcgagctgatcactaatgacagcattgtgatcaatgatgcgtatgtaacgaagttttcataaaaacccaaaaggacagtgtttgaatgagcatccagatagcagaacaggtgggggttcctggagggtgactgcctcgagagggtgtggaagctttgcacccttcccacatgcctcaccctttgcgtctttttaatctggctgttcctgtgtttcctttataatctttataataaattgttccctttataataaatgggtaaacataagtaagtgtttctttgagctcagtgagccaagctagcaaattaatcgaacctgaggaggggtcatgagaaccctgatttaaaaacctctgtcagaagcacaggtcacaacctgggacctgccattggcatctgaagtatggggcagtcttggggactgagccctcagcctgtgggatctggcgctctctccaggtagatcgtgtcagaattgaattacaggacatccagctggtgtctgctgatgaattgattggttgctggtggggagaaatcgccatacgttttggtgaccagaggtgaaatattctgtgcacggtagagggtaggaaaggcactttggtttttttcctacatcttcttggcgcactcttcctcagaggttagttgctgtaatttgttttcctcataaagcttttccttttcaattacaaatatatatttatgcacagatgtagtacttataaaatgaatgttacctctcttgggaaacagactttttttcttcgcaactctttggagagcatgtcccttgaggtgtgacattattttagctgtgtaacaattaactggatctgagttgttttacatcagctaaatatcagtctccttgagatttgggaaatatttaagtctcatcagcagtattttggggaagggggtgctcctgcagacagcagctgctgttttctgtttgtttgttcattgattgattgattgagacacagtctcgctctgttgcccagactggagtgcagtggcatgatcactgctcactgcagcctcaacttgctggacccaaacaatcctcctgcctcagcctcctgagtagctggtactataggagtgtgccaccatgcccagctaattttaaaattctttttagagatggagtctcacttttttgcccaggctgatatctaactctgtactccagtgatcctcctgcctcggcctccgaaagtgttggggttacaggtatgagccactgtgcccagcattctgtgcgttctcactggctgtcatgccctgcaaagaaagttgaccaggtgcagtggctcatgcttgtaattccagtgctttgggaggccgaggtgggatgatcacttgagcccaggagttccagaccagcctgagcaacacagtgagatcttgtctctacagaaaattaaaaaagaaagtaaaaaaaattagctgagtgtggcacctgtggcctagctagctactctagagactgaggtgggaggatcacttgagcccagtagtttgaggttacagtgagctatgattgtgccactgtgctccaacattggcagtagagtgagactttgtctctaaaaaaccacaacattttaaaatttatttaatgtccctggattcctacaggtattgaattcctatgggtatgggattttgactgtggtcttttcctagtttctataactgtgctgataagaaaaaagagactgcccttttttttaaacaaaacaaaacaaaacaaaacatctggaagttggtcaagtcttatctttccttctgtttctctctggtggtagcagacagtttacctgtaggtcaagagtttttagattagcctgggatccatggataggagtcagaagggctatctatcttctgaaaccacatgtagaatttagttaagtgtgcatttcacatttcactggggagagtgtttcatgtcagatcccaggatgaggataagcacgaacactttytgatataggtgtattctttgtcaagttggcaacaaggatcctggaagctgacttgatttagggattagaacatgtttttcctttttattcctagtcccagaaaatgatatcagtgggaataaaatgagagagggcagtttggactgttcctcagtgaagaacaggggtttgcactcatcaggtggatgtatgggcttagcctgtatgcgggggcacctgttcatattaaatctcatgttgtggtgtgacagcaatgtcatgactgcctttgtccccttgtgagctttgtatcatgtagagtggagatagctcacaccctcatttaactggccagttaatgaggctgctgctgctgtgaagtgtgtgtgtgcttgtatattgttaaaaatttaacatataggttattactttggtaaaagtaaaaaaaaaaagtatatggtataaaaagacaaatcacactgtctcagtggtaccacttcctagtgaaatgatcttgggcaaagttactcgctgtgtgtcaattttcctcatcaatraaatgggtaccaaagtagtgcctgcctgtattgtgaggattgtaaagattacataaaacaataaataattcagaaaaggcaattgaaatgttttctggtatatggaaaactgacaataattatctcttatgatggtggtggtattgataacaataatgacacctagaaaggcctgtaaccaaaagtcagtagtccttctttcttcaccccagcccatttttaagaaacaaccacttttaaatcctctagctatttcttttatctccatatttcaaaaaattacattttcctaatttgcatcactccctcagcctcgactatgttaagcttctttattgactttctcttttagaagatcagatcaggtttttatttttttctagagataggatctcactatgtttcccaggctggagtgcagtggctattcacagataccatcatagcacattgcatccttgaactcctgacctcaagcgatcctcctgcctcatccttcagagtagctagggctacaggcatatgccaccattcccagcttgaagattagggttttttctttgtttgttttttgagactgagtcttgctctgtcacccaggctggagtgcagtggcgtactcttggctcactacctctgcctcctgggttcggggtttcaccatgttggccaggctggtctcraactcctaacctcaagtgatctgcccactttggcctcccaaagtgctaggatttacagccatgagccactgcacccagccgaagattaggttttaagtgacacctcctgtttccctacacttttcttcatcttctgatgcaattatatgaagttttggttaaattggcatttagtgttaacataatgatcatatgaacattttaactgctaacctgagttgaaaaagttgggtgaaatattgtttattgactttagttatgagtgaagttaaaggttgttgtgtggttgcagtttatttaggtttattttatgacttgctcatttttctcctcagatgctcagttttaccttactggtttgtacaagcagtctggactcttagaaaatattggtggaggttgaacttcttgaagaaacgttgagcttttgtcaggtgtggtggcttacgcctgtaatcccagcactttgggaggccagtgcaggaggactgcttgaggccaggagttcgacaccagcctggccaacatggtgaaaacccatctctacaaaaaatacaaaaattagccgggtatattggcgtgtgtctgtaatcccagctactcaggaggctgaggcaggagaatcgcttgaacccaccgaggcggaggttgtagtgagctgagatcatgctgctgcactccagcctggatgacagagcaagactcttgtctccaaacaaaacacacacacacacacacccacacacacacacacacccccaaaaaccccctgagctttacatccatagatgaggagtttggaatacaaatagatgacctgttatctgtgtcagcttttgatactatctgcccttcacgtctttattcttagattgtcatctgtgggtggaaaaccttaagtttctacccatagaaataagcccaccatatttcagaaaacatggtgggtcataggaaagcactcagatgggacaacctagttggatttggtacaaaatgagccagatgtgggaaaaggcaaattaatatgattatgaaaagtaagaatgatggagctgggtgcggtggctcaggcctgtaatcccagtttgggaggctgaggtgggagggttgcttgaggcctggagtttgagatcagcttggccaacaaagtgaaacgccatttcttaaaaaatatagtagggaagagcagaggtttcttaagagtgcactcaacaaaaggattaggctgatctaataattggaatgtcagtattgatttagttttccttggtacagtctacccagagtgggggaaggggcagagcataaggataaagggggagttgtggttttgtggatctcaggtgtttaccaatgaactaggtggaggtggtcaggtggtggagagcttctgttctgagaacctgaccgagaggcaaaacattgtctctatgtagtgcttggcacaaccgtgggctccratctgggaaagagtggactcgggaccacagcagatttctctatggggctgcagtcaatgaaattgtcctgaagcaagcctggtctagggcgttctggcctctaagattgagagggatggtggacagggcagtgggccagaggtgaagtgagatgaggaaggccaagcctttttctcctgaggaagccagtgctagggcactaattatagttttacacaatgccagcttccagcctgcatagagaaacatgaaatttctgcttaaaacagagttcctttttccatttttggctctaaactttttgtgttggaagttaggaaccaattttggagagtgattgtagtgagggaatctggaaaacctgcgaaaatggagaagctcattttaggcaggaaaaatctgtctcttggaatgagtagcagagggttttcttgctcaaggtagttttcttttctgttcttggtgtggtgcctgactccacatttttcacccagctcttaaacaggttttgctgagtagctacaggcaagtcatcttctctgtaaattaggtgtagttaataacacctgttactcagagagtgactggattaacaggtaagagtttggactggagtgacccagaartggtatgaaatagtgagaagaacttgagatcgctacgtgtcccagagaagacaccttccttagatctaagttgaggagactgaattaaacagcctttgttcatttaaaaaactgtttttatttttatttatttattttgagacagagttttgctcttgttacccaggctggagtgcatgttgtgatcttggctcaccacagcctccacctcctgggttcaagcgattctcctgcctcagcctcccgagaagctgggattacaggcatgcccaaccacgcccggctaattttgtatttttagtagagatggggtttctccatgttggtcaggctggtctcaaactctcgacctcaagtgttccatctgccttggcctcccaaagtgctgggattttaggcatgagccaccrtgcccggccttattttttaatttttaaatttttcttagagacaaggtcttgctctgttgcccaggctggagtgcagtggcatgatcacagctgtctgcagccttgaactcctgggctgaaaccatcttcctgcttcaacctcccaagtagctgggactacaggtgcacatgccacaacatgcgactaatttttaaatttttttttttttttttttgaggtggagtctggttctgttgcccaggctggagtgcagtggcgagatcttggcccactgcaagctccgcctcccgtgttcacgccattctcctgcctcagcctccygagtagctgagactacaggcgccygccaccacacccagctaatttttttyttgtatktttagtaragacggggtttcaccgtgttagccaggatggkctygawctcctracctcgtgatccacccgcctcggcctcccaaagtgctgggattacaggygygagccaccacgcctggcctttaaattttttttttttttttttttttaatagagaatgggtctcgctatgttgcttggactcctgggctcaagcaatcctccccctttgccctcccagagtgctgggattacaggtgtgagccagtgcacccagcttaatcagcctgtgaagtcccctccaggtcacacagggtgaatcttgggaaggcagactggagattctgctccccctgttatctctgtcttgtctttagagttggtccagtgcacctgggtgtgtctgagatcatgtgcccccaggggcagcagtagtgagaaagacggttgtgaaaggcacattgtcatgatggtttttctttctgtggtttatccttatttcctggcttcgcccacaagcacagattctcagcctcttgcctttgtctactttcttttgaacatttatttggaagccctcattttgtgcccatgtttttttttcctggatctggatgtggttaataggagtgccctcagcccaacctgagtaccttgtgtagatagtctggctaatttaacattctgaaagacctccttatagcctgatgagaatcaaagtcaagctggtaaagctactgttgctactctgtgcatgccactccccgacccctgcaatatttattaaaatgtaaccgtttcagggctcaaggcttgaagctgcttatggattttttttttctttctaacacaaaggaaaaaaatgggatacatgtgcagaacgtgcgggtttgttatatagatatacstgtgccatggtggtttgctgcacctattgactcgtcctctaagttccctcccctcatccctacccccagcaggccctggtgtgtgtttccctctctgtgtccatgggttctcgttgttcaacttgcacttacgagtgagaatatgaggcatttggttttctgttcctgtgttagttwkctgaggatgatggcttccagcttcacccatgtccctgcaaaggacatgatctttatggctgcatagtgttgcatggagtatatgtactacattttctttatccattctatcattgatgggcatctgggttggttctaagtctttgctattgtaaatagtgctgcagtaaacatatgtgtacatgtgtctttatagtagaatgatttatattcctttgggtacatacacggtaatgggattgctgggtcaaatggcatttctggttcagcatccttgaggaatcaccatgctgtcttccacaatggttgaactaattacaacaaaagccaaaattgataaattgataaagttgatctaattaaactaaagaacttctgcacagcaaaagaaactatcrtcagaatgaacaggcaacctatagaatgggagaaaatttttgcaatctacccatctgacaaaggtctaatakccagaatttacaagsaacttaaacaaatttacaagaagaaagcaaccccatcaaaaagtggagaaaggatatgaacagacacttctcgaaagaagacatttacgtggccaacaaacatgagaaaaagctcaacaacactgatcatcagagaaacgcaaatcaaaaccacaatgagataccaccacacgccagtcagaatggcgattattaaaaagtcaggagacagtggatgctgacgagactgtggagaaatgggaatgcttatacactgttggtaggaatgtaaattagtgcttatggtttttaaaaggcttccagagcaggggacccatatatttagtcccatagaacacatcccttaacctgcctcttagcatttcatctatccttccttatataagttctttcttctggagttgggacaggaggtgtcttgttatttgggtagaaaggagaaagaatgggtgggtatgtggacaaacggtgcagggaaatagatagcatgggaagtgttgccacagctctatggaaactacttggatattatgattaatggatagtcaaacatctctcaaataaatatcaaagagtgatcttccyttaaaggttattgttcccaagtttatccctctcttggtgccctggctctggtttcttttcttctaagttgcccctttgattacttgtcatgtgaatatcaaggcctgatccttcctctgtgtgagctccaaggggccgccttccagtggagctttgtagaatcatatgtgtcatagagaacaggttttaatgctgggctgctgttaggctttagcgctagtgctgagaggccccacaaagagctgaacctactgatgaggcctctcccaaatctaatcagagatgggggaaaatttgggtgctgggaagagcagatcatctcagtgattttaatgcccacctttatttgcaaagtgaaaggagaaatatatttccctattgcatttcctacccttcacttgtcaggcatatttgatatwtttttttttgttttcatttaaaaaaaattccaaaaacaccatgtcaaatatgtcaaatatttattttttaaaaagtaggccaagtattaatgtctttctgctaaatctagtgggttctctctcacccacccccgctccaaccaggtgtttgcagaaaggatctttttttttttttccggaaaggatctttatccagaaaggaattttaaacctcagagttaagttcttcttcacctcagtgcttccctcactaaacatcatccttacccagaatgtatttcatagagtgttcctctttccatcctttgatgctttatgacccatgaaaataatgaaaagtatttgtttcgggcccctagtattaccaggtttaggtactattgctatcctgcatctttttcattcttatctctgtgctgtaattctatctcccttcttgagtatttcacaactggagacaagtgagttatcttccctagaactcttaacttaccctaagtgtaaggctctggatagacactcaagggcttttggaatgtccactcatgggagcagctgtattttgttgctagaatataaagacctcatctttcaaaatttctttcttaacagttaacagttttagattcttggatgctgaatgttcaccagttctttcaactagatctgtgtagtcagaagtccatgctctttgggaagtctgagaaactttaggtgccattcctatctcctctcattttggggttcagattgtgaggcagaatgcctgttgagactttctgagcgcataggaagcattggagcagtgggatctggagtggcttcaccaggcacctcagagcacagtggcaggctgagaacgtctgtgtgatctcacacaaaaagactgtctgggagttggaaaccactcctgcctgtgtgttacttcctgctgctggacgtatgtgtggtatttggtgttgccacactaggtgggggatggagaacaaattatgtctgctccttggatattagttaacctcattcagatgattcttgggtgtcccatggggaagtaaaccgatttccctggttttgctgtaggacctgattagtcacatactgcagagaaccaacatgtagcataaggcgccattgccagcctgaccagtgtagtagggaactgggtcccacttccgcagcccccagccctgtcttctagagttagactgtacattgctaactaggcttccttttttaaaaatwaataaataaataaataaataaataaataaataaataaataaagtgagtgtgtcttttggatctcttcagattagaaaaaaatctgtatttgacttttcctatgtttgttctgattttgttcagtcctttacgctgaagcagctcccccactcttcccacttaactcctatcttacttcaccatatcttttctagtccataaatactaccttccatgctttattctggtcctctaaatctttcctttatacttctgtttttcctgccaatccccaactcgtacagaaccctactgtaggagaacataactgagaagaatttaactgggtttgaataattaaataaattcccatacgaaggtataataaataattttctagatactttgtacacatgacactgaaaagagagggacatattctgtaaagtagctcactgggggaaaattaccattgctacattttcagccttaaattgtaaggagtgcagatggttagccagcctatgtttctcccacccaccttcgttttaaactatcctaccctggaaagatggatgcttataaaataaatgaaaaagactttacctttagaatgacatagattgtgattgacaggtccaggtagctcttgtgtatgtgaaggggagttatataatgtattaggctttcttaattcattccacaaacacctattcctagttcttgtctgaatctccatttattttgcagcaaagatgtccccaaataaggtgcttatatatagcaacagattctacttccttacattttgtttcaggacagctcacacagtttttttaacacatttcaatgggcccagaatccatcgtggtaggaagtaaaactgtttttacatatatattcggtcacttcccagttttttcttttcttttttttttttttttttcttgcaagctccttctgtctgggctgactgagacccacataacatctcagccagctgagttggacattcccgggtttctgttggtgtctgaatatgtgcagagcagtagaatatgtgctacttgaatcttgctgtgcgtgagctgctggaagtcgctgtgtctgactagtgtgtagaagctggggctacctgtgatggggaacatgaatattcgaggagcacaggtggatgtggggtggggacgtggggtgtgcatcgtcacagagccagcctggccctctggagagttggaaccctgtttccttgtcctggccaatgtgaaaccttgggaatagttgcagagtagagaaatcaaaatacacaatctattctctgcttggcctttttacgccctggtgcarattgactaacctgtggtttttgatcatctctggtccagcggttgggaatctgtgctgtctatagcatctgagtgttgtgagaataaaatgtgaaaataggtatgaaaatatatataaaccataaagaatttccccatgttaaaatgatgtgtgtcttccagtgtagaaggttttatcttttctatatctgtatatataaaaaacatttattacatattataagatacatatgtctgcattcagatgataaaactaaggcccggaaatgaaagtatcttcccaagctcacacagctaatcagtggcctagccagtgcttgaatcttctctttgaattctgatatctagtaagctgagtggggcccattgaagcagtagccaaattatggtactaagtaccgtctgatacattaatttattcagcaaacattacgtgcctgttgtatccccagctcctggtattttgggtattaggtgattttttttttttttgtcattaaaatttcctccccccacccccaccccacaagtaacttgtaatgagcttcagaggcatttagctttaaaacaaaaatcttcctccctctttttaaccacactacccttggttcttagtttaaaaatttagttgacattcctgtgtgtttttatcttgcaattggccggagggttatttattaggaaaagagattttgaatgatttcagtaagtgaactaggagttgtgatacacgattatattaaattgcttatggttagttttccaggaggtgatttaattgttcaccttcctaagtcttcagtcttaggcttatccagtgggarctggaaagctttaataggcaagtttattggaacacacttccagagtcaaatgtcactcttggcagctgcagatgtcaactgggacaagtattcagagcctgagaattaaggatatgtgttaaatatggccctcataggcggccccagggttttttttttttttttttacttttgcgaacatgttgacagagatgaggctcagaaggcaggtatacatgtgccttgtcttcattctctgcagagagaatgtttttaggggcttgggaaagtatttcaactcgaagaaaggacttatagttactagaatcttcacatctgctttctcgagtgaccttgagtcaaccacagtcttgtggggtagatggtattattcacccctcttttgttacatattaacatgacaaaactaagactcagagaggaagtgccttccccaagcacatgcagctagccagtggcacatccagtacttgaacccttttctctttgaatcatgctttgtactaagctgatcacggtccactgtagcagtaggtgacttatggtactaagtaccatctgatacattaatttattcagcaaacattgagtgtctgttgtatctctagtacctggcattgcaaagatgagtaaggcagtagacagataactgacataacccatgacagtgcagttgcgtaagtggcatgatctggagtgcagagtactgtggggacacccatgagggagccacaattgcctggggtagggagttrgaggaggcagatgacaggaggtaatgactgagctggagctggagggatgagcaggagttaggcagattgcaaagggggtgcgggcatgtgctgggtggcatttccagacaaaatcggagggcttggaacagcagtgtgtgctcacacctggtacgtagcaggagtgagaggcaggaacagcagtttgaggcttgacagccctgtgtgcgaagcgaagcatttgaatgatgtctcattaccactgtataccacatgtccttcccctgcagctttggctgacatctgtcattctaccctactcctgttggccttactttctcccttttacccctctcaacgtttgctttaggctgtcagtgtttactgcaccccataaaaggttagatcctcccaccaggcctgatctgactactaggagagactgtctgtatctgctggagggattgagagaattggtacagaaggagttttgtggatcatgacatctagaattagcactctgagaaagagggagtaagcatggtattaggattggaaaaaggtttttttcctttcagaccattacaaaaactcatgagttcaggatgtatcagttgtgtgaataaggtggatgtttgaagaccccactagcatgtgttgagtttacagccactgtgcaagatgcatcttaaagattgatagtctgtgcacttttatcccgaggtgtgaggtactggacctctgtcataggggagagagtagaggctcagagaggttaagtaacctgcctgaagttgctccaccagtaagatatggaaccaaggattcacatgtgggctggccaacctcttcatgccctgtgcctcctatgtgtgtaggtgggtctgtcactactgccctgggtgtcctgcagaatggctgtggttcccagtccacccccttgggagccttgcctacattagctcgatttgctgacaggtgaacaaacaagcaaccagctgctctgataggcctgggaacttgtccccggagagaatgcccaagtccaggaaggttatgccaggtcatgaagcagaagtgtctggacatgtcacacagtctgctgagccagcagtgcccacttcatagccctttctgtagggcccctgtgttgactccctgcatggtactcgtcccttagcccaggagaggccccatgggaggagggagagttgcagcaacttctggaccctgagccataggaacttccccttcccaatctctgagaagatgttcacagtgacctggccagggtcactgcaagaaagaaaatggaatgctgatggggcaagggtgacagggaagccaggcattccagctgtgttcaaagcagtgacaatgactgtgggagcgggtcctgttttatatattcatcattctgaggccttcagggactattttgttagctacataagtgttgaaagggctgcgtaaaccagaaatcaaattctgtagattggcatctgctggataaatcttctgctgggattgctacaacatgttgaataaccgtgtgttttgaagaatgaaaaagataagacagttcactgagttgcaacgtttatgacacagggaatggaggactgtaattaaatctacataaaaaggccatgttttccaagtgtactttgaacttggggcaggtgttctgagtgggtgggtgcatcatctcatttccccctgcggaggaggctgctggcaacctgggaatggaggttaacaccatttgttacccctgaagtttctggatgtctagaggaggacccccttcccgcgccccgcccctccatgcaccagtccagagctgtggtctccttcctgtgttggagactcgctgctggtcctccgctggtgtctgagttggttaaccttaactgaaccccttaactgaacttttcttgttacatgtattccagctctcagtgaagtgacattctgccctctgggcccagatccctgaacccttccctgcatttcagacctaaatagcaccctgtcagaaagatcagtggggccgggagctgtggctcacgtctgtaatcctagcactttgggaggccagggtgggtggatcactttgagcccgggagtttgagaacatcctaggcaacatggtaaaattcttgtctctacaaaaaaacccacaaaaaattagcagggtgtggtggtgcatgcctgtggtcctagctactgggtggggaggagtagggggaagctgaggtaggagagaatcacttgagcccaggagttcaaggctgaactaagtcatgagtgagaccctgtctcaataagatcaatgggttggaagtgaaagtcccttcccaaactcaactctggggaagaagctcttgccttctctggccctcccctgcccaccttgtccaccctgcttkgcccatcacagcaggcctcccgttccactgcaataaccctccccactagtctccttgtgcgggaccagtctttactcttctttgggttgctgtttgcgtcagggctcacagctttgaaggaggttcaagccaccatcatattttgctatagtccagactgctggacattgatcagtcctctgtccccaccttaaccctgtgcacgcagttgcactgcggggcagattcaagatgctcaccctgtgtcccactgcttgttttcaggctgtgttgatcacacctgcctgctgcctttcaggatcaccttcttagttctttgtatccacctttgtccccaccctccacagccttgtcttgaaggccacataccacacctttgaagctgccctcttcctgttgaagccttccttgcttttccaattgcttttctactgttgacaaaagtagaggggactgtgacctagggttataattcatctccctgcagttgtgcatgatgtttgtgcagagtgaattcttttttttttgagacagggtctcactttttgagacgggcctcactccagttgcccaggcgggagtgcagtggtgcaattgcagctcactgcagcttcgacctcccaggctcaggtgattctcccccctcagcctcccaagtagctgggactacaggtgcacaccaccacacctggctaatgttttgtatttttagtagagacagagtttcaacatgttggtcaggctggtctggaactcctgagctcaagtgattcatacgcctcagcctcccaaaattctgggattacaggtgtgagccacagcgccccgccccagagtgaattcttaaccttatctcatatctattcgctattcttgactcccttgtttctattataatccttagagccgtggtggtcaactccaagagagtaggaaccaagtctgcatgatttgcctaaaatacttgatactttactgggagtaagtataatacttgaaactgctttgttgagaaaaataaaagaaagcatctgtccagtctactataataaaatagcttagactgggtaatttataaacracaggaatttatagctcacaattctggagtctatgaggcccaagttcaaggcaccagtagattcagtgtctggtggggsgcccattctctgcttcatagttagtgccttttatggtcttcacttgatggaaagggcaaaaggtatcccccaagtctcttttaaaagggcgctaattccattcatgagggctgagccttcatgacctaatcacctcccagaggtcccacctcttaacgctattgatacgtggattaagtttcaacacaggcattttagggggacacaggcatgccaacmttagcagcaacttttcatataatttgtatcctaaaaacagtaaaactcggccgggcgcggtggctcamsccygtaatcccagcactttgggaggccgaggcgggcggatcacgaggtccggacatcgagaccatcccggctaaaacggtgaaaccccgtctctactaaaaatacaaaaaattagccgggcgtagtggcgggcgcctgtagtcccagctactygggaagctgaggcaggagaatggcgtgarcscaggaggcggagcttgcagtgagccgagatccygccaccgcactccagcctgggcgacagagygagactccgtctcaaaaaaaaaaaaaaaaaaaaaacaaaaaaaaacaacagtaaaactcaatagctctggtttattgactgtttattacatgcctgctaagataggcattccctacctggccattttacagatgaaggaactcaggttaaaggaggttaacaaccttgtccaaggtcagacagcacatctggattcagacatcagcttgtgtgacttaagcttatttttctcttcaccatgccagtcctgcctctagcaaaatacacgcagatttcmtgataccacttttaatttcagcaaattatgttatcattttcaattaactgataattagctggcagtccttggaaggtagaaggagttctgatggaagccctcatcgttttttattctttcatgacttccacttgaaggtccttgcttactgaaatggaagccataagtcctctcgtcacccttggtagaagggtgctaaatcatccttgctaaatacttgacggaaaccatcagtcatctcgtttggctctcatcaatctctttgttcatatgcacaggctcttaatctctgttttccctttctttagagtaccgtagtctcagatgataaacttctctgaagctaatttcttcactgctgccctggagtgtctcttcatgctgcattctaaacaagtgaagagcaaagttgctcttggtagggcagccaggttcaggacagtgctgcttccagatcagaaaacatccatagggtgtagtctggcccacgcttgatgtaggcacaaggcagaggcgaatgragatcatgggaggtcctttggtgtaaaaaccccatctgcctggagcttcaggattagcagtgtttcacagcccgtctgaagtgccagcacttgggaaaacttacaagagagatgtttgggaagtatttcaagcactgctttgtgtccttaaggaacagtgagtgaatggcccgttgcaggctgagtctgatgtcagtttttgacttccgtatagtagtacatcaggtggcagctggctgcaacccagcctccactgactttagagccagccaagtgagttctagtttcagcccacaggtcttatgttgttgccgagggacctttacaagacacttaaacccttagtttcctcttgtaaatgagaattttaaaaagttcccgacacagagagagaggccatcaataaatgttggataccttccctttcacttccctgtttatggtttttgaaatttggaaaagaagcttgtcagatctgtgtgtagaaataataaataataggacttccctgtgtagaaaagaaaaactttattttttagggattttgttaggcatttgcctacttagagatcgttctgatggtcttgttctcaactgtccccagccagatggggaacataggaaacgtattatgtgcgagccaatgggtccagagaaaagagatagacagctattgtgatgtctatcagaggacactgtcttctcccgtgccaggtgccaggtgtgctgaagatctactttgcagattgaccccataaggatttatgcacttgagggctcatctctggagacacatggaaaattagcaaggcaaaagtttggagtaaagatgtctgcacagagtgggcagcttgtgtgttggagaacaagccatgttggccatttgttgtgaatggcgtgaggaaaaatgcttcagaaacatagacttttctggatctgcaagcaccagcatttttggtgttcttttttacttcagttttagatttgcagcagtattattgtttcctgattttgttaagcagatcttcagtatttcatcagcagtatgggttaagttggcattagaagctatgctgggaacctaatcctcacccgtttgtctgggaaaatgtgtttccgtgttgcacagtgagtgaactttttgatggcagtgtgtttgtaagttggggactgcctgtagggcattttgtaaagaagagaacattcttttcaaaccaagggcttctgagagataaagggagttgtcattggaaccacatgctaaaaaagcatgcttgaaattagttttgattttaccttagtacagttgagctgaaataacctctagcagggtkctctagcaatacagaatattrgtagtagactcatggaggtcatctagtggtttctgatggagagtttacagactgatttggtttgtgatgaaaattacattctctgaaatttatatagaaagcatgtattatatatcacttatataacgtatttgttaaatatggcagtcaccttatgtgttttataaaaagtcatgtagttttttagtagttcctgccttattttttttccttcttttcttttaagacggagttttgctctgcaatcttggctcactgtaacctccacctcccgtgttcaagtgattcttctgcctcagctttccaatagctgggattacaggcacctaccaccatgccyggctaatttttgtatttttagtagwgacaggctttcaccatgttggtcaggctggtctcgaactcttsacctcagrtgatccacccgccttggcctcccaaattgctgggattacaggcatgagccaccgcgcccagccgggtcctgccttatttttcaatatccaggtacatgactccaccaggtcctaggtctgccacctctttgtgccttctttggcttttgtgatggtcacacccagggtgccaagtgagaacagtttttttttaaatgatatttcagaaacaaatgttttattaattatttttataggtatcagtatattgtgtatggggtttaggatttcacctcattatgcttcagcctgattattgggtatacaaaaagtaattagaatagaatagtataaagaagaaaaaactttcatgacccaaacctaaccattaactaatagttaacactgttacatttctttctaaacttcttaaaatgtatgtatggaacttacatatataagtaaggttttagacaaaaaggttttggataaaattgagattttagttttatttattttaatttttattttttagagacacagtcttactctttcactcaggctggagttcattggcatgatcatagctcactgcagccccgacctcctggacttaagtgatcctcccaccttagcctcctgagtgtccaggactacaggggtgagccaccatgcctggctaatttttattttttctactttttgtagagatgaggktctcamtgtgttgcccaggttggtcttgaactcctggcctcaattgagcctcccatcccagctcccaaagtattgggattacaggtgttagccactgtgtctggccaaaattgagattttacacacacacacatrcacacacacacttttggtaacttaatgtatactgaacatctcccatattaccaaatattcttttcaaatgtcctttggtagctgtacacatcacatcatatgtgtagtgtactaaaacttaacaacccccattattggtgaccatgtagtttgttaatccacttttgtgcaatgacgggcatcttcctaagttaattttttgttgttctttaattatttccttaggataaattcctagaagtggaattcattggttaaaaggctagacatttgttatactcctgccaaactggtgtgcagaattcttggtgcttgctgttggtagcactgtgagtagtttcccagatgtagtgtgttgcaggggtgacagtactgaaaggccctccaccccctgcaaagcatggcaagtgcagcagcaagatctgcggtggcaaaaaccaggaagacagtcattcccatcatcttttgacattgcttttttccccattttttaggggggacaattgatgttctttgtcaattcaatcatatttctttctttttttaatgtacgaagatagacttcctatattatattgcctttttaaacatctttcccacacaaaaaagagagctaccgacagactgtccattccgttgcactaggacgctcttcaaacaaagccggtaccttgaggagacagtaaaggaggtctgaaatgaacatgccccgatcaccagccaagcactctgatgacagagcttggaagccagggtctggggtaagctaactaggataaccacagtcgtaacgaccaattacagaagaacactcgcacaatgagactttgctttcatcaacagtgacagaactcaggccagttcttttgattctaaaaaggtaggagatcaaacccaatgcttaccacctgctaagcagaaagatctgatccgctttcccaraccagttatttgttgtgtggctggaaacagaagaagggctgcctaaaactgagtggtgggctaggtagtacggggaatagggagaggaagaaggggaggagcagggagcaaaggtactttcagggagcagtattttaagtcttcctggaagaggaagttaactgggagattggagtataggctgtgctcttagcatgtataccgggaagtaaacacctcttaggaggctggcttgaagttgacagttagtaatgcaagctattgattttttttgaaagtatttgttaagagtgaattggtttctataactgtgaaaatggctgtaggacaacgtttcccctgcccaattgtggtttcagatgctacttttcaccactttgaacctggaggacatcttggttttagagactctacctgaaaaatgtaacttaggttcattgtacttttattgagggcttggcactggaataagtgttcacagattgataacataagatccctgcccttgatatattcagtttagtggcagtgagaggaataataatataaatagataattttattattctggcaaaatatacataacgtaaaatttattttcaagtttacagttctgtgacatgctcatgttgttatacaaccgtcaccaccatttatttcccaagctgtttcatcttctctaacttaaactctgtatctgttaaataataattcttcctcatccccaggccctggcaaccaccattctactttctgactcagaattggactattctaggtactttagttaagtggaatcacacagcatttgcctttttgtgattggctgattttacttaatataattcctcaagactcatcgtactgtattgtatgtcagaattgtctttttaaggctacgtatcattgtatgtatatatcaatttattcatcaataggcactgggttactttcaccttttgactgttgtgaataatgctgttatgaacatgagtgtacaaatatacacatacctcggagatattgtggtttcagttgcagaccacggcaataaagtgaatatcatagtaaagtgtcacacaattttttgtttcttttccagtgcacgtaaaagttatgtttacactatactatagtcaattgaatatgcagtagcattatgtctaaaaaaattgcagagaccttaattttaaaatgctttattactaaaaatcgtagataccttaagtttaaaatgctttattgctaatggtcatctgagccttcagcaagttgtaatctttttgctggtggagtgtcttgcctcgatagtgatgccggaaggctagggtggctattgcaatttcttaaagtcaacaatgaagtttgccacgttgattgactctttccttcatgaaagatttctctgttttatgtgatgctgtttgatggcattttgcccatagtcaaacttctttcaaagtgggagtcaattttacctttcgacccagcaatcaaaaaataaaaaatttaaaaaaaattaaagtcagtcctcttaaaccttgccactgctttatcaactaagcttatggaatattctaaatcctttgttagcatttcaacaatgcccacagcattttcagcattagattccatctcaagaaactactttcgtaagaagaaacttgttcatcataagaaactccttatttgttcacattttattatgagattgcaacaattcagtcacatcttcaggttccacttctaattctagttctcttgctgtttccactacatctgcagtgacttactccactgaagtcttgaacccctcaacatcatgcatgaggcttggaatctacttcttccaaactcttgttaatgttgatattttcacctcctccaatgaatcacaaatgttgttaatggcatctagaatggtgaatcctttctagaaggttttcagtttactttgcccggatccaccagaagcatcactatggcagctgtagccttacgaaatgtatttcttaaataataacttgaaagtcaaaatcactctgatccatgggctgcagaagggatgttgtgtaggcaggcatgagaataacattaatctccttgtacatctccatcagagctcttgggtgactaggtgcattgctgatgagcagtaatattttgaaaggaatctttttttatgagcaataggtctcaacagtgggattcaaatattcagtaaatcatgctgtaatgagatatgctgccatactggctttgttgttccatttacagagcacaggcagagtagatggagcatacaagggccttaggatttttggaatggtaaatgagcattgacttcaatttaaagtcaccagttgcattagcctctaacaagagagtcatcctgtcctttgaagctttgaagtcaggcattgacttctctagctgcgaaagtcttagatggcatactattttaatagaaggctgttttttctacattgaaaaaatctttagtgtagctaccttcatcagttattttagctagatcttctggataacttgctacagcttctacatcagcacttgccgcttcatctagcacaatatgttagggatatggtttcttaacttaagcctcatgatccagcctctgttagcttcaaacttttcttgtgtggcttcctcatctttctcagccttcataggattgaagagagttagggccttgctctggattaggctttggttcaagggaatgttatggctggtttgatattctatccagaccaaactttyttcgtatcagtaataaggctgttttgctttcttatcattcatgtgttcactggagtggtacttttaattgccgtcatgaacttttcctttgcattcacatcttggctgactccttggcataagaggcctagcttttgacctgtcttggctttcgacatgccttcctcactaagcttaattatttctatccattgatctacagttagagacatgtgactcttttacttgaacacttagaggccattgtagggtattaattggcctaacttcaatattgttctgtcgcaggaaatcatagggaggcccaagaagagggagagagacagtggaatgccccagtcagtggaacagtcagaacatgtacattaatggattcaatttgccattttatatgggcgtggttggtggcaccccgaaataattacaatagtaatgtcaaagatcactgatcacagatcaccataacatataataaaataatgaaaatgtttgagatattgtgagaattaccaacatgtgacacagagatacaaagtgaacacatgctattggaaaaatggtattaacaagacttgcttcacacagtgttgccacaaaccttcaatttgtaaaaaaaacgtagtatctgtgaagcacaataaaatgaagtatgcctgtatctacttgagtttcaactttaagttcttttgggtacatccccacaaatggtattgctgggtcatacggtaattctatatttagttttttgaggagttcctatactgttttctacagtggctatacaagttcacattcctgccagcagtgcacaagaattccttttcctcgcatgcttgctaacatttgttctttctagtttctttcttaaaaaaaaaattgccatcctaatgggtatgaaagagaatctcatcatgggccttttttttttttttttttttttaaagagatggggtcttgctctgtcactcacgctggagtgcagtgtgtcgtgatcatagctcactgcaggctcaagcgatcctctgcttcagccttccaaagtgctgggattataggcgtgagccaccaccagctaatttttaaaaacttttttgtggacgtcttgcagtgttgcccaggctattcttgagctctcagcctcaagcaatcttcccaaagcacaggaattatattaattatattaataggttgagccactgtgcctggcaaaagttttaaattttgatgaagtccatcttacttatttttttcttttgttgcctgtgctttcagtattacatgtaagaaatcattgccaaatccaatgtcaaagtgctttatttttatattttctcctaagacttacagttttagcccttaagtttaggtatttgatctgttttgaggtggtggtttcttttgttgttgttgtttgtttctttttttgtatggtgtaaagtaaggaaaggtctaacttcattttttttttttttttttgcatatgaatgtccagttttcccaataccattagctggacgataattttaatatgtgaatgaagatacttttgctcacaggagtttttgagcctcagtgtctggctacagggttctcatttgaatgtccagttttcccagtaccatttgctggatgacaattttaatatgtgaatgaagatacttctgctcacaggagtttttgagcctcagtgtctggctacagggttctcatttgaatgtccagttttcccagtaccatttgctggatgacarttttaatatgtgaatgaagatacttctgctcacaggagtttttgagcctcagtgtctggctacagggttctgctttaatatgtaggaggaagagattcaagcctcttgctccattatgggtagacagcacactacagggagcttccctgagggaactttctgtgtactgtttcctagaaatctgtaggaaccatttcaagtgacgtggaaggaggttatcaaggtaggattagaaacatgtatttattatgctgcttactatccagtcttcagttatatatgtgttattattttacagaaggcttcattggacaaaaattccttgttagtcttttttttcgagaaggagttttgctctgttgccccggctggggtgcagtggcacgatcttggctcattgcaacctccgccrtccaggttcaagccattctcctgcctcagcctcccaagtagctgggattacaggcatgtgccaccatgcttggctaatttttgtatttttagtagaggagtttcaccatgttggccaggctggtcttgacctcctgacctcaagtgatctgccagcgttgcccctcccaaagtgctgggattacaggggtgagccacctcgcctggcccctgttagtgtttagtatggtttctttttgtgtagggggagtgaattttttgtgtgtgcgtgtgcgtttgcttattgtacccatttctcatggtatggaaaaaaacaggatttcatactcttaacaggataccctgcacaaggtgggaaaatatacctcgtgttttaaagaaaaatagtttaacaaatggctttcatctgggttgtactccagacttgctgctgcttcatgcttttccaattgtgccacaggcctgatcccttagcatgtgtgcagctgtgggctagagggttgaaagcaggtcctgtgtctctttcctggtgaactccacagggacacagctgcaggtcttttgtaacgctctgtatatgcacaggaagtcccttacaacccactctgttagatctcatttcctcttcggttatttgccctctgtggtctctgggtgtcagcctggcctgccttttcagggttcaaggagctgctggattggtgccctcttgtggtctgcctttgatgtggttgggatcttgggagctgaaggcaaagaaaggacaagtgagctaccgaggagtaaggaagacatgaagttgagaagataacagagggaagttaaaaaaaaaaatctttggttgaggaaattgtttctgaatataacatgataaaatcagtttaggttaatcagtttaactgcatcaataaagaatttctttgcaaaacactacttaaaaagacagttaactagaaagaatttgtgaggcaaatgagaaatggccagtttccttaatatataaagagcttttataaatcaataagaaataaaagaccaataaatcaacagagaagtgaggacaggatatcaacaaaccagttccagaagaacagaagccttttaggcatatacatagtcttttttttttttctctttttgccggctgctctagccagtttacttattttttatttttatttctttgagacagggtcttgctcttgtcacacaggctggagtacagtggtgcaatctcagctcactgcaaacaccaccttccaggttcaagcgattctcctgcctcagcctccgaagtagctgggatcataggtgtgtgccactatgcycagctaatttttgtatttttagtagagacggggttttgccatgttggccaggctggtcttgaactcctrrtgtcaagtgatctgcccgccttggcctctcaaagtgctgggattacaggtgtgagccaccatgcctggccgtcttttaggcatataaaagatgtttaccctcacttaaaataggacagcaaattaaacagaccaaaggttaaatatcattaagagtgagggggaaatagtacattatatataaattgttgatggtgggggctagctgggcatatatatggaaattttaaaaaatgcagattctttgccctagcaaatccactactggaaatctattctacaaatatatatgtatatccatacattaagttcattttagaaaaagttgagacataatttatgtctgtcaatggaggactagctgcagttccttcatatagtggaataccttgaagcccttaaaaaggaggcagtcttaaaagtattgacagtataatctttgagatatataagtgaacgaaggtgcagacagcgtgtattagtgtctgtgtttgaaaaaaatcattcacacatggttttatatgtagggactgcctctgaagggatgtacacgaaactgaaaacagtagctgccagagaagtgatcagcaatccggctgggagatagagtaggaaggagacaggctttgtgccttatactattttgtaccctgtgaattttgcatcacgttggagatgcaaaaagcaactaccttgaaaagggcagtcgagatcaagtggagtaagatatttattcagcgcaatgttaattataaaaagtaaagtaagtagaaagaccagggtaggaactaccgaaaaacaaaccaacgaacagaaaagaaaaccaaaaaaacccccagaatttcatgtctggttttaggttgccacaatttaataatgaagaagggacagattatagaattctgagatagagaatagcgagatacaataaaatgtagttatcttaaaagaagtcagtatgcaattgattgaatagacttcacccctcactggaggaatatcttgcccacatagggagggaagaaactgatggccaccgtcttggacacaagctaccatgcatgcatataaacacggaaaaatgcttgccaaaatggtagctacatttatttctagcagtaggacttagccaatcatttctgtctttgttttacctacttgtactttttagaaaaagattattacgttcattttttaataatgagaaaaagtgaagcttcccatttctgtgtgattctttatatcttcctgaccttctcttttttcacttcttgcagtgtgaaaaccctttctcccgttgggctgtcgtagttcatcatcagtaaaacctccatattctcaaccctttcttttgagtgtcctttaccttttctgtcaaaaacttgctctttcctgatttccctgtttttcctgccaagcctcaggagaagcttttcccacatgctgcttatctttgggccttagtgccgagacgtggggggtggtgcttccttcttacttcctatttctttcaaaccattctccctccttccctcctgcctaaaacaccagctttggatctcacatcaccagagccactcactactcctgagctatttctctgtgattttatctcctaccttattgtctctttctttccagtatcactgcttcctttagttcttggcaatttcagtgtaaacataggtaatgactttagccattgtctccctctaccttagaccttatcattaccagtaattgcagtcctccataaccttaatttcatgcatcccatcctctgaggacaaccttctattttatgaatttacttctctactacttttattttaaaaacaaaagagacaggggtagatgggaacttgatgctgccctcataagcactgattctctgggctccacaatcacctgggccatttcctgggccacccagcctgcttcttgagggaatgctttgtgatttgattgtttatagatgttatgctagacccctgttgactccaatagggatgacaccatgtttgagagactgaagaaaagacccggaggtatcaaatgagacatagggtttatttgggggactcacgtacagagccgtccagtggcagcgggcttggcaggaagcatgctgctaccttttgtaaaaaacatgtagctcatatagcattttcatttagcatcctccccctggcagcctcccaaaacaaaggtctccatcccctgcgttaaaagggatagggcagggatttggatgtctttaatagacaaagactgaatctccaggttggccactctcagatttcttagcctggaactccaaaccaacactcttctcattcttaggatatgcttcagttatggctatcaggtgcctctgccataaaacaggaagattttttttttaacgtaagaattccttttcttccatctataggttgttaaaatggaagatttgttttaccgaggacatgaaaggcattgcagttgcttgggcattctagaagagggtgctgtcctttgccctggtgttttcttaggtggctgtggcaggaacactaactcttaaggaaatggatgctttttctttcctggtacataatgtatgaacactagtgtgttgttttcattgtgtagtgtggtttaatagtatgataatgtagttttgtgccgttttatagacgtgaagaaaataaaactaatgggcatgaattgatgaagttttcaactgagttaccaaaaaaaaaaaaaaaaagcttcctaatggactttcctggaaagatttgtctaaatgaaaatttggtggatcttaaagaagagaataatttttattgaacatatagtttgtgctagccactatcttaggcatgtagcttattaacacttatggcccatttgtggaacaggtatggttacctgcagtttaaaacaaggatgccagtgttctaagaggttgagttgcccgagatatcactggtatgttagagtcaggaatcaagccaggtcctgtgtgccctgcccagcctgactttaaaggactatgtagggaaactctctgaaaccacatttttcctttactctcacaccacaacagttaacacggaagacttctgtgaccgattgtggtgagagaggggggatttcctcacacagcaaggcacagacaccagttgagtgtcctccaatttacttgctacactatttacctggagatagtgtcaaatcccacaggttggaaactcaagtctctaaaactgcccctgccccctgcagacatgcaaacctgagcctctggaacttctgattgattgacttcaagtcgaggttcccataaccccctcttagggtttgattaatttgctggagtggctcacagaactcagggaaacacttatgtttactggtttattataaaggatattttgcaaaggacacagatgaagagacgcacagggcaaggcatggggaaagaggtgcggagtttccaacccctcccttgtgtgcyaccctccaggaacctccaggtgttcagctatccggaaactccctgtacccagctttcttgggttttttggaaacgttccttcctacagtgcttagccctctcaggggagggtttgagacccacaatctgaaaggtggggaaagattagattcctgcctcgggccaggtgaaaggaaggcaggaaagagattctgtttcctgacccaacattatcacaaaagactgtaacaagggctgtgggagttatggaccaggaacctggttgaaaaccattataaatcataacaccacaaggacctatattttgctttttaggacattgtagtaggtgggtagttttcatcctcttgctttttaaaatctatcttgcccagaagtttattgggcatttctatggaaacacaacacctctcttaaatggcagtttcacacatctgcagcctagtaattgctactcattttgaagaccctgaagcacaccactggatctggaagtgacatcttcgtcaccaaggaaacagtagattaagtcctgtgctcagtatagttttacttctgagtatttagtaagtatgataaattattaaccaggatatttgattaggtagacatgcctatattccagatagcaacagtttaccattagagcaaacagaaaacaccaggaaaaattctgcaggacaagtttgtaaaatgcaatgatacatctttatgacatatatcctctgtaaggagataaaaacaatgtatgtacaggagtgtacataaataaaagttgaagaaagtacatcctctgtgatttaaaaaaagaaattcaatatacccattaaaaaagtgacaggtgtattagttttctatggctatagtaacaaattactacaatcttgatgacttaaaatgacagattcattctcttatagtgctggaggctgtaagactgaaatttaggtgtgggcagtgttggcctcttctggaagatctgaaggagacccatgcctccgtcctgtctcccagcttctgctgccatttcttgtatcaccccagtctctactttcacctttatatggctttccctcatgtctccgtgtcttcaccttttctgtttcttagaaggacacatgtcatggggtttagggcccaccctaattcaggatgatctcatctcaagatatttaacttaattacatgtgcaaagaccttttttccaaataaggtcatattttgaggttgggggagttagaatatgatcgtagattttggggggcaacaatgtaactcacttataaatggtccactgacccccccaaaatttgtcctgtgtgcagaatgcattcatctcatcccaattaattattaacactgctttgtgaggaaaaattaagaattttgaaaagtgagaagctatacctctgggataaataaaaagacaaatggcagaagatggatagtcgctaatcttttttttagataaacattttgttttgagatagttgtaggttcacaaacacataagaaataatacagagagatcccatattacaaaagacaccgggatgttgacgttgatacagtgaagatacagaacacttccatcgctactgctgttttgctgtttattacctgccccggatttccygcccctccactgctccctgtccctaaccrtggtccaccactaatcgttccacaattttatacaaatataaccatactgtatgtaaccttttggaattgcccttttttactcagcacaattctctggagattcgtgcaggttgttgtatcagcagtcattcgtttttattgctgagtaatagtccattgtatggatataccgtagtttaaccatcggcgtaatgaaggccatctgggtggcttctaatttttggctctaacaaagcttctatgaacatttgtgtatgtatttttgtgtgactatgttttcatttctgtgggatcagtacaattgcctgatcatatggtagtttagttgcatgtttattatcttctttaatatgctttttttaaagagcagttttaggttcctagcaaaattgaggaaaagatagagatttctctgattccccttggcccaacacatgcacaacctcccctattatcaacaccccccatcagagaggtacgttggtcacagtcatgaacctacattgtcacatccttatcaacaagttaatagttgacattagggttcacttttgctgttgtacattgagtgggtttggacaaatgtatgataacatgttatccaccattatagcatcatacagaatagtttcacttccctaaaaaatcccctgtgctctgcccattcatccctgcctttcccctaacccctggcaaccactgatctttttgttgtcctcatagttttgcctttttaagaatgtcatatactgtagttgaaatcatacattatgtgacctttycagattagcttctttcacttagcaatatgcatttaaggtttctcagtgtcttttcatggcttgccagctcatttctttctttcttttttttttttgagacagagtcttgctctgtcacccgggctggagtgcaatggcgcaatctcggctcactgtagtctccaccttctgggttcaagcgattctcctgccttagcctcctgagtaactgggactacaggtgcgtgccaccayrcccagctaatttttgtatttttagtggagacggggtttggtgaaaccccctctggccatgttggccagagtggtcttgatctcctaaactcgtcatctgcccaccttggcctcccaaagtgctgggattacaggcgtaagccaccgtgcccggctgccagcttatttctttttagcactgaatcacattccattgtctagctgtaccacagtttattcattcacctactttagtacatcttggttgcttgcttccaagttttggcaattatgaataaagcttctataaataccatgcgcaagtttttgtgtgaacatacattttaaactcctttgggtaaataccaaggaacatgggtgctggattgtatggtaagactgtttagtttcacaggaaactgccaaattgtcttccaaagtggctataccattttgcagccctaccagcaatgagtgagagttcctgttgctccacatccttgttagcacttggtgttgtcagtgttctacattttggccattttaataggtatgtagtggtaccttgttttaatttgcatttccctgatgacaatagatgtggaacatctttccatatgcttatatgtcatctatatgtcttctttggtgaagtgtctgttaaggtctttagaccattttttgttaggtttgtttcttattgtcgaattttaagagttttgtgtttttattttttgttatattttggataacaacctcttatcaggcatgccttttgcaaatgtattctcccagcctgtatcttgttgtcattctcttgtcaggatcttttgcagagcagaccaccatgcttggcttgaggttcatttttttggtcgatggatatccattcagttgcttcagcaccacttcttgaaaaggctgtccttcctccactgaattgcatttgcatctttgtcatatcagttattcatatttgcgtgggtctgaaataagagtttggcccatatctactgatagttctgccagtttcacaaattaataaaagaaaatcattatattcaaaggatgtttgctttttattattattattattattattattattattattattttgtcagtagtagattagccctgaaaatttatgatgacttccagtgtgatgaacttactcctccttatacagtaacgtggtctatgtggctttgggagttcttttctcttttctcttttttgattcttggagttttggggccctggagatggtagtgatgaatgacgaattcagcaaaacttagaagggaacagtcgagggaattgagacagccaatagaggacttgaacccctttcttcaaatgctatgaagaataaataataagattagttttcaaagatgtgaaagagactctgaaaaaggaacggaagtgggtgcttggcattgctttctctttccttcccctgttgctctgtatttgggcattagatgtgggtgctggaggagaaattaagaagaaaatkttaaaaatcttgataactagacagtctgatttctgattttccagtttagataaggattactggatggaggagttaactaaaatatactttgtacaacaaagcactgttgtgctgttacatccacattaaatgtttactcatgtgcggcctgcaatttggaaagattcggcagaggatccaactggcacattgtgctctcttgatctattcagttttttaagaacggaggaaagtcagctttcgttttgtgtctcatacccagaaggacttcagttctttctttcagtccataatttctgtaataagcatattatctttgctcagtaaacaggtccctagcaagtgggtgggttttggtgtgtcacccaggacaaggggcccagtttgttgtttttcactatcccaacttgcctcttaacgctcaagtaaaaggggaaagaaatagacccagcctcacttgcacccacaagtcagtaataattagtcttccagcaggtctcctctttgtttctgcttcttggagagggcatcataagcagcagttcaccaaagttagcaacaagcctagatccattcagtttttttttgggtgtgtgtgtgtgtgtgtgtgtgtgtgtgtgatgtcttttgtgtttgtcctgtggggacaaatacaaagtaggatccatagactccatattcaggcttagaataaagactgaaattaatcactattctatatggaataatcttaattcagttgcgagggatacattgccccttgaatctcaagcatagccctgttttgtctttgcttggtggtagctgttaaccaggctctgggtgagcctagaacttggtctcacatgagcagtgtagatacctctctgcctttttgtttaagatgatgtagcaggctgggcgtggtggctcatgcctgtaatcccagcaccatgggaggccgaggcgtgtggatcactttgggtcaggagttcgagaccagcctggccaacatgktgaamccccgtctctaytaaaaatacaaaaaatttgctgggtgtggtggtgcacacctatagtcccagctactcgttaagctgaggcagacgaattgtttgaacctgggaggcagargttgcagtgagctgagatcamgccactgtactccagcctgggcgacagagtaagactctgtctcaataaaacttaaraaaaaaaaaaaaaaaaaaaaagagatgatgtagaagaaccatagttctcatttttggccagtttgccttccagattttctctgtcatgtttacctatatcttttacatggttatagtcagagtatttgtactatattctcccctgtcctcatatgtacttactcagggtttttktttgtttgtttgtttgttttctatcttgatcaatttcactgtaagtttgttacttggcatgagggtagaaatgttgattcttactctactgcttactctactgtgtggtggcgaagagcatgcatcttgaagccagcccatctgactttgaagacaggctcaactgtttttcagacgtttgactttggtccgagtcacttaatctgcttctctgactcagtttcttcttatgtaaagtaaaataggggtaataagaatacccacttcatagagttgatttgaggattaaatataaccaagtatatgtaaagcttttagaatagttcctgacatatagcatgttctgtgtgttagctattattatcatcactcagttaattttgaaccacttaatttccaagtgctggtgagtctaaagagcagagccaaacatgtaattacataaacccagaagtgaatttttcaaatgtcttttctagtaatagagcttaatgagattggcacttcagggaaaagtcctaggaacttgtttatgttggtgactgttgatcagccagaagatctctcagacgcagtctaacatctgcatctttctaggctggactacctttgcggcaccaacagatggatcaggaattaaaactgggagcttctgttgtggggaatctttcatcttctactgttaatagccttttgggtttccctctcctgggtactactttctctacggagagcttggtctgtggcacaaacaggtgccgaaagggggaagaaacacctctgggtaaatatctggaggtcggcaggtgacagagcagtggtctggggacactggttcaggtgtatgttcatcaccctaccctttaaaactcacatggaaatgacttggctgataagttacttgtggttcctgtgataattaaggcagcctgttggaccaggacaaaggatttcctcagctttcaagagaacgtttctaccaagagccatatactaaggtgtgctggttatgtgagtgttgacctcagtattagtatcacttctgttgaaagtgacagaaaacctctaaaacagggtttaaagatagtgtacctcattatttcagaatgtttgtgctgctgtaacaaaatacctgacactgtgtgattcatgaagaacagaaatttatttctcacaattccagaggctgggaagttcaacatcaaggtactggcagggttggtgtctggtgagggccgctgtctgcttccaaggatgcaactggttgctgaatcctctagaggggactaatgcagtgtcctctcatggcagaagagcagaagagaatgaatccactccctcaagccctttcataagggccctcatcacctcctataggcctaccttctagtacaatcacatcagcagttaagtttcagcatttcagcgtgtgaattttggggggacacattcagaccttaacactcactcttttgtttttttttgagacacagtctcgctctgtcacgaggctggagtgcagtggcatgatctcagctcactgtaacctctgcctccygggttcaagcgatcctcctgcctcggcctcccaagtagctgggactacaggygcgtgtcaycacacccagctaattttttgtatttttwgtagagacggggtttcaccatgttggccaggatggtcttgatctcttgacctcgtgatctgcctgactcggcctctcaaagtgctgggattacgggtgtgaagcactcactcttaatggctctcagctctaattatttgaatcttgggcttttatttagctgctctcccatccttagttagaatgatagcagtgctgcaaggtggctgcttgagcttcagctatcaggtcttcatttgagtcaacaggaaggaatgtcaaaagagggaacagttgcatagtcatgaggaactgcaaaggtggctgaaaaatgcagtctgtgtgcccagctaaaattcaaggactgatggcttgagtccaggagttcgaggctgcagtgagctaagatgttacgacttcaaaaaagacttctgataaattttgacatttctatttaacagacatttgggagacacacccccaccccccagtccaggtgcctgagaataaaaacttagtcacactattggtccttgtgctccaaaagctcttcagttatttgattgacccatggctgctttttggtactgaagaaccttattagtaatttagtgagtttttaatttagatcctgtatgtggtggcatgggtgggtggtggtgattgtattgtagctaggagctcctagtcagcaatgcatgggctctggggccatgcatgacttcaagaatagatggcctagggcaacccacttgggtccccttccaygctgtggaagctttgttctttcgytcttcacaataaatcttgctgctgaaaaaagaaaagaatagatggctttgcagatattccagggaagcatttgagtgacacctctctattgtgccacttaatcagttggattggaagttgagccagcaggtttgaaccttgttcttagttttaaaccagggcaaattactggtgctttggttttctaatgcctgtaaattagagcttctgagccatgtggggagcaacccctacccgcaaaggagtgatgtaatgtctgggggctgcaatggttttttcctttgagatggataccatataagctagtggtgatacttactttatgatagtgacagggaaagctactgccaagagtaattgatgtgacccacacatagtcccagagccaaggagctagatgggatcttcctgcctgaggaggccaagcgtctggccttcaagcattcttctctgctgtgatgttgtttcccgtcctgaaaagcagggaggaaatgatcaatcagtgtgcctcaacctggagccgattggctgtggttgctaagttttcttccctctgagcagccctccctgtgattctgaagcagctcattcggagtgttacaacagacatcttgatgggattcaaaaatgttgggcagcatggttatctggtcttcttctgtaaggatgactgtgaggtgtgccagcccattcccgtagggacacacctaacccgacgccctcccaagggctgaattgttctgagctgtccaggcttgggctatgtcaggttctgagcactgaagtgtagtggagggtatatgacaaagaggcgacagagctgattaccctgcttgttttcttttatttattcagtggtcttggaactgggcaagaggattttatggattagctcctggaagacacacactagaactaacatagtaagattgtgtttaggctgtcagagccacctccagggtgagaacgattttagagaaatatcctttgtgtagcaatacaggaacctatgctggctcaacagctgcccttttggaaactgccagccgaaggggcctgttgatgagctgtttactgccactggggcttcccaaatgggaagtctctgctaaaggagttcattgttcagcatgtctagtggaccctggctcctaacagctggattcttttgaacataataaacatttctagaacaggttttcttggtgagcttttagcttccttttaataggcacatcacttgcctgcctttagttctatgaagttcaacataaatgttgactttagtgatgcagtgggacaaaacagtattatatttctcatcagttccctccctgtctcccttcccctgtcattgttttccagaggtaaagtacatttatggagaacatcggggtgaatgccaaagcggcttatgttctaaaatagtgaaaagaattgtgcagttggagttagacctatggtttgagactcagctttgggactgagcaaatcatttcacgtgatcaattttctaagctccagtttcctcattaggaaaaaagaagacaaagtaatacttgttgtaatggaattaaatgagataatgtcttcagaatgccatgtaagtaaagaaattgtgaatcaccttcactgatttgttccatagattttgttttttcctttcttaaaataccttgtattgaccttcacctaactttgtatttggacaacacccaacagtcctagcagacctttaaccctcccgactccaatttcagtaatgtgttagaagtggcagggacagaatatattctggattcattcactaaatatagagatattatacaaaatgaagctgaactcacgctccagtgggcagtgtcagtttgcctgtgagacagcgctatgcagctgcagccactaagtgtctaggcactggagatggacggctagagtgggaatcctggctccattcaacctctctttgcctctatgtttgccatcagtggtgtggatatgataataattcccatcacataagcttgtggtatgcaaatgagatcattttaaagtgctgagcccagtacctagcatatagaaagaaatggggcttttattatagtgataataatttttaattgtggtaaaatacacataacataaaatttaccatcgtaaccgtctttaagtgtacatctcagtggtgttgagtatattcacattattggatgaccaaattccagaaccctttcattatataaaatccattcaacaactcttcattttcccctcccctcagcccctggcaaccaccatttaactttccgtttctatgaatttgactttgcatagtgcatttcactttgcatagtgaaatcctatggtatttgtctttttgtgactattaatataattgttaagtcttagcccactgtaacagttgtaccctttcccattttagatttctataggctcaggattgcctgccttctcaaaccctggttattggtggattatttctctttcttttctttttttctctcttatttttttagagatagagtcttgctctgttgcccaggctggagtgcagtggcatgatcatggctcactgcagccttgatctcctgggctcaagcagtcctcctgccttagcctgccacacgtagctgggactacaggcacaaacaccatgcctagataatttctgaatttgtgtagaggtggggtctcacagtgttgcccaccctgggcttgaactcctgggctcaagtgatcctcctgccctagcttctcaagtcactgggattataggtgcacgccactgtgcccagctgaattattcttaaggaacaagatgacacctcagagctccatttcatccttttgaagagaggggcaggattaggcaaaaggagaacacagagatgatagtgaaagagatacagaggtgagtgttaagtaagcgaaagagcatttattcagggcagagtagagtctctttgtgggactcctccttccctccctgccttcttccctaccaggtaaaaattcaaacctacacaacaatagagaggatgatataaccaaaccctatgtacatgtcagccagattcaacagttayccggattttttagggcccatttgtaatatggcccaggaggaagaaaatgcctgaacaatctagattaacctagaggcaggtgtttctttgcttatttgtgcaattttatttatctccttcctgataaagggcttcttctgccttgggacttcttactatctaaggttgaggtaaagagccaggactctatgaaaycacattacttaacttggtttcctcatccatgtaggagagcacatgtggcttctaaaggtggtcataatggagtgtttggcacagggactgctgcctaataagtaatcatttacactgttagcagtggtagtgtgtttgtggaagggaagggtcaccagccaggtccttgaaaacacaggactgaaacatgcagcgggggatcaacacaattagtcatactgtatcattgatcaagggttgggatgagcgctgattttctagaattgcacctactgtatgttcattatcccattttactggccattgtacaggttctgtcctagattgtgctgggttaagggaaacagtagtttatctgcaaaattaggtagtgtaactttttaatatgcttttttgatggtgatgggattgctatttacattaaaaacattttatgggttttaaatataaataaaaatatcacaatttgaataactagataatatacatttggcttcgtgaatcacttttttgtttttgttctttggaattctaggaggaattctatctactaataaaggctgcagactttatcttcctacaaccttaggacgtaagaaacgtcctaagatagatgcctgggaggaaaaggaaattgagggcctacaggtgtttaaaaacctatagtttataattgcttagagcctttgatttcccccccccacccatccatctgtagcacccagagagccttggttttgtaacattttcacttttgaatctagtttatcatatgaaagttttactgttctgtgatattttggggcatgggaggatctgtggtcccaaagtccagagtagttttaaatgtttttctgtgttaatatgcaaaagtatcatgaaggcgaaataaattgtttgcaaataattgagtcaaaatattattgttcctccaaagatccttacttagtcgtgtgtcacagcttgtataacaggacgtattttgcagagctgtttagtttgcactgacttgtgcaacaggaatggccagttttccttacgctcagggcaatcaaacacaactttataagaattgtaactttaaaagatttcatatttttgttgttgttgttgttaaaatcgttgatgaaataaattcaatagtaaaacttctaagatttgagtcatcaaacctctaaatatgctgtttttctgttctgttctgttctgttcttttctcttttttctttttttttgatgcagtctcactctgttgcccaggttggagtacatggcacgatctcagctgactgcaacctttgtgtcttgggttcaggcgattttcctggctcagcctcccgagtagctgggactacaggcatgtgccaccatgccyggctaatttttgtatttttagtagaggcagggtttcaccatgttggccaggctagtctcaaactgacttcaggtgatccacccaccttggcctcttaaactgtgggattataggtgtgagctaccctgcctggcctaaatatgctgtttttcctttctatttattcggttgaccagtttctttcttcttcttttttttttttttttttttttgagatggggtctcactgtgttgcccaggctggtctcgaattcctgacctcaagcaatccacccccttcagcctcccaaagttatgggattacaggcatgggccaccgtgcccggcaggtcaatcagtttcattagaagacttgggttatgtctcctacagcttgtgtaatacagacatttttatttttacattagtctttgtatgaaatgaaaaaagaaatcagttatttgataaatacaatccttcactatctcattctattgaatgcacttgtttcataatgttccttttacgaagagtatattgaagggaaaaaggggcagacacatgtattactatctgtttttcttttttttaaattttaggatacatgtattactaacaacaacacacaaagcatgtaggtttgagttcatttggagttggcttctccactcttgtttgggataytcctaagttgttttagatgttggtggtgtttgtgttccttgtcaccctgtctgtggtgacacacgtttgtgaaaaggccacctggtttactgtagatgtgaagtcatggctgtggactggagcaaaagtaaccaacagaagtaggattaacgctgtgagcatagccttcttgctaactagctgagctctctggccatggtttttggttccgttgatataaagagatgtgcaggggctgagtggcattccatggatgtgcagtcaccttgtgattccaaggccctgtagcccctcagcacatcatcaccatgccttcattctactttctgctgccttttttgtctgtctataccagggcacaagcagacaggatcaggtagccctacctttatcagtggctctgggaaaggctcttctggaggaggaggtggtgtgtgctgccctccttcccccaccatcactgcaagtacctgacagtagtaagctgtgttaagggaagggaggaaggaactttggggatcctaagacttctctgtcacaggcgtgtaaggcggactcttctccgttagcctttttttttttttttttttaattwaacttttaagttcaggggtttgttacataggtaaacttgtgtcacagaggtttgttatacagattatttcatcacccaggtattmagcctagtacccattagttatttttccttatcctctgcttcctcccacccgccacctccagcaggccccagtgtgtgttgttcccctccctgtgtccatgcattctcatcatttagctcccacttacaagtrggaacatgcagtatttggttttctgttyctgtgttagtttgctaaggatagtgtcctctagctccatccatgttcccacatgagacgtgatcttattctttttatggctgcatcccttagccctttaactcatcatgcacgatagctgcctttggattcttccttccagagccccttcttggaaggtgtgcatcagcttggttactctcgggacttcctctgtaccacacgtgccctttctcttattcctgggtgctctcttctctcctcacagtcttccgtgtgtgctaagatcgtgcagctcctggggcagaatgaggtggactatcgccagaagcaggtggtcatcctgagccaggatagcttctaccgtgtccttacctcggagcagaaggccaaagccctgaagggccagttcaactttgaccacccgggtgagtcgggcattgaagggggtatgtatstgtattggtgkgttggggggaatagttttattttgctcatgaggaagttgcttaacctctcggaatcttgtttctatctagaacgtagggacttgataactaccttgcagtgttattgtggggcttatgtgaaagaaggaattttcaaatgcttcaagtagtgcttggctcattaaatactgattgaatctgtatctgaacaaaggtgattttgtatgagcctgggactcaagatgggccagacatgaggtcgaacatacagagctagtcctgctgcctctgatctgaggcagccctcgtcagaccctcctcctcaggtgtacatgtgtgttcaacccactgtctggcagagagggagatggaggggcagggtggctgccagagtggtttttgccctacagccctagatcagcacactgctcctttagctggcttgggtttcttataattgttagaagcaaacctgggcatggtgcctattgtgtgtactcccccagtcatgggtttgctttccaggtcagtttagcatgtgccaatcctaggatgataacagctaaacttggagaggggaaagaactgactgaagtcagggatggaatgtcaaaggagagaaaaaagaaatctatttgtcagaactcatttatacaccctattttgagatacagggagcatccattctgctttgggtaaaaatccagctttttagggagcagtatgattacctttaaagtgtgatgtgcccatatacatgtttatgaggatgccttgtgtatgattataggagatcctattttaaaattaagaaacattttaacaatttggtatttttcagatgcctttgacaatgaactcattctcaaaacactcaaagaaatcactgaagggaaaacagtccagatccccgtgtatgactttgtctcccattcccggtaagtgagctgttctgggccagggatggcacccactgctccgcagagcatccctggtctgcactgagacctccttccttacctctcgcacttcagacctctgtcctacccctgcctaatgccattccagctggtcagtggagtgggtggtggcagcagtgtgtgctgtgggattgtagaggttggggagttcatctgagcgctccctggaacagtcctgttgtcacgattccttaactctgaaggatgggatmgtgatttcagcttgagggactgcatgtgcattctgatccacattccagtgctgytgttcctggaacaagatgtaaggggaggggtagaggaagggcaggaagaagagcaaagaaaactgttttttctgctgtcctggtttacttgggattggacaatgtggagaggcatgaggtcaccagatcgtgatctcagaattaaccaagccctccagaaagcttctcagtggaatcaaaccagtcctttccagtgaagcctcaattttagtgctcctgattaggaatagaggagtggccacacttccacctcatcctccttccctttgagtgatgggaatgggctcctagaagattgcactcctgctggccagaccccaggctccttcagagcgtctcagacctgaatgtagaacacacacatcttcccatgagtctgaactagagagcatggtgacgatttggttgcaggaggaagatgagagagagagagagagagaatgagcatgcatgtgtgtgcgttgaggtgtagagggggctgttttggtgcttacctccatgcctcaccagaatcttctgaaacacttccttctatgggccaggttcttctgtgtargagagaggagagtgaaagatcaggataccatcctcacgcctcccgtgtcactctgttttcctaacccaaccactgcagatcatggaggaatgaatgaaggcatttcgtataggatttggagcttacacgaacatcaaggctrggagagtgaaggcctggaagtttatagycagagaatcagacaaaatagtccccactgactctagcctgaggcactggagcagaagctggggttcatggaaaagtccaagaaaccaccatgtctgggtttgcagcctcaatctgggagcttatggactgtttgcaaagtttccctgtctcagtattatgatctcctgaatattgtggattttgcttcactctcamcttcgaagtctcttgttggcgtagtaacctggaagcatgtggggcaagggattctgagaattgtagttctcccttagggggaagtggtggtggtgtcacgttgacaagagacattccagcccaccacttcccaagtaaagaattaaaatgcagcatgatggctaaggcaagggcctgcagaagaatgtaaaggagggaggaagagcaggggattcagagcaggttgtatggaggaggtgatatttaagctttagataggaaaggataagaagttgtttgggaaagggatttccaaggtgctgggtagggaagcatttcagagctaggcatggatcagcttggttggggcatggcagtggagaggtgtggaggaatgggagtgggtgtgtgggaaggcaggcagacctcaggtcatgaagggccataggcggcagggccaggagcacagacattttggcaatagggagctacagaygggtctattgttgtagtggaaaggtcattgtggtggcaggaggagagaggatctgcaawgccatttgtgaagaagcctttggaacagccccagtgagagtctgataagggcctgaaagaaagcagtggaactgagcatggttgacaggagccagggcctgaccagtgcagtctaggagtggaggagggaagttgaagacctcgtgcatcatgagttccatcaagttgatatgccaacaaaagaaaatcctggtagaattcccagtgcagacatgtttcacgtttcctcctgatttatctcataccttatattttaaaaccttatcctttagtggctcaaagctcatgtcttagaaactttcactgatcaccctagacccatatccacccctttcctacctccttgcaaatcttaagggccacttaattggacatcgagccattcagggttaactgattccatcccacccatgggcgtttggtacaaacaaaaatttgttgggctaaaatgaagaagacatttacttgttgcaattacatttctctgagcatccttttccccataagccaaatgagatggttagactgggttatctcagatgatctaattggctagtttctttctggggcttcccagccagactctaaattcctaagtggtatattatgccaggtatgactccttgcacattctgggctagtagttgctcaataaatttgttgttgttttttaaaaactctgagctgttatgacagtttttagacctgcgtttggacttgggaaatgattaattctaacttcttaaggcaccaccaacaaattaggcagttaattttctccttccgaaggaaaaccacttttcctttttagtatttatcagttaggcatcctaaaatgctcttaatatctagtgtcagtacagattgaacatccctaatctaaaaacccaaaatgtgaaatgctccaaaatctgaaactttttgagtgccagtgtgacgttcaaaggaaatgctcattggagcatttcagattttggattttcatgttagggaggctcattgtagatcctctctccccctgccatattagggatgccctaaatataatgcagatattccaaaatctgaaaaaaatccaaaattcaaaaattctaaacacctaagcatttcatataagggatacttaacctggatatgtaaacttagtgcagccattgtgttctctgttagtgtgttcaagtggactcttgcacatacattcactttatttttggacaaagccttcccacactctccttggtgtaggggagttgcctagagagtggctcactatttcacttacccattggttctgttttctgaacttctctaggttgccttcttatgcacaatgacaatgggcacaccattttctggcagctgacattcctctagactggtgcttctctaccctggctgcatgttagaaatatcttgggagcttctaaatagtgttgaagttctagctccacttcagactcattaaatcagagctccttgggggtaggatccaggtagggatatttttataagcttcccagatggttctgatatgcatctcagatacaccacaattctagggcatttcctaatcctagtccttttytcccgtcttccctgccccgttctgccacttgctagctaccctagcagtgcctgccttaaaactcagacacaagcctgttggtccaagctgagaaggcatcaggaagtgtttatgggaaggagttccaacggcaccctcttgagctggccgttgatactgacctccttatgtttgcacagatggaactactgttttaagagactttgttttatttggtttgccagtgtgctagtcagggtgagtggaaaccttgcaatgatgattatttctctattttcagtgaattttgagcaagaggcagttggtgacatataaggtgggcataggacagaatcaaaagacaaaacacagtgaaagctgcagcaaggcaaagctgagcacaagcaaggccatctgtgamagcccgtcgcctaaccgtttagcaatgtttcacccttcttgctttttgaaaagtcatgttggttgagcttggtagctcatgcctgtaatcctagcactttgggaggctgaggtgggtgggttgcatgagtccaggagttatagaccagcctgggcaatatggtaaaaccccgtttctaccaaaaatacaaaaattagcctggggtggtggtgtgcatctgtagtcctagacacttagggggctgaggcgggaggatcgcctgagcctgggaagttgaggctgcagtgagtccaagattgcgccgctgcactccagcctcctgggtgacaaagtgagaccctgtctccaaaaacaagaaaaagaaagaaaagtcatgtttacaattagtgcctgccctaggctacccaaccatgtgggttgggtggatgaggtcatgcatatttctgctttattgataaggaagagcagctctagggagctcaggattgacctgtggccactttgttggtttggggtagagccagaccagacagacgtcgggattctgtacttcctcacaaatgctttctcgtctgtatcctctttcccaaaacttttctttattttccctccttcccttccccttctgtcctttcctccctcctttcaattgcctcaggactggcggggaggggatggagttgttgagagaaaactgtgagtttctgtttttaaagttcagagtgttaggttccataaatgccaggccatgagagcattcctggagacgccttcagagaaaaaaagaaatcacatctgtttttgtctgcctttattcttcattcaacagcaggtttttttaattccaaggagaaggatgtctgccgtgtatttctgtttcatggtgaaagctcagaagtggtcaaaggagacctttgtcccggccgtgatcacccttggctctttggtggtggtccgagggctctgtaagaccatattagccaagtctttarcccccgcttgaagtctgtgggggcaaggaacccagaacccagcccagccagatgttctrgcccttgttctctgtcccttgctagcccctgcctggcttggcccattatctgctctgtgctttgcaggaaggaggagacagttactgtctatcccgcagacgtggtgctctttgaaggratcctggccttctactcccaggaggtacgagacctgttccagatgaagctttttgtggatacagatgcggacacccggctctcacgcagaggtgcgttctaaaagcctcaggtggccctgttggtggccaccttgagggcgggggagctgggagcctgtgacaggaccccacccgcctgagtctgaagcccatgccttccctgaggcagctgtgtrtcgcatggtccagcccggctgcgtcagtccagccccaggatatcctgctgcccagacacttggtaacatttgagaagggattagtcacttactgtttgggataacgaaaggcttgtgaggtcacagagactaaataagacactgacatctggttttgcctggaaaagtttgattaaatgcttagttccttgcaatttgtttataagacatcaaaatgaagatgctctgatttggggaactaactgtaggacccccgaggataggatcccctgtgcctgaagtactgggcagctcatcctgttagcctgcttctctagccctttattttccagcaggctttatggaggcattatcactctttccagtcagctcaggagggaagtcagctgtgccctccgcaggccctactaagtgtgggcctgcctgtgctaagtccctgtgcttgtgtgctgaaggcacagcagtgccccttggtagaggagcccagcctgtgaactgagctctacagggtattcagcagagagttcgcttccaccaggagagattgggaggcttcatggaggaagaagggttgggacttggatgtggtggggtagggtgacgctataggcaacccatgaaggtgcacggcagagatgtacagacagtggcttgttccgagagtggcaggaacctggagtgtacagagggttgtacgaagagacactacaaagtaggttggggtctggttttagagactgagatctctagtctggttctcggtgggcaagggagagccactgtgaggttctgagcgaggcaagtgaagtggccactgttctgtgttggacactggttctgacaaaggaaatgtaagtgaagcctgtagctggagcagctctttggagactgctctgctgatctagacgagaggcagggctgtggtccttagatgggtgggagagggagcagagttgagatgagaagagtattagcagagttagaatcgaccaggacccagcaagggcagtgggtggaggcgactgaatagaggaatgaaaggtgagaaggtttgagtctccgttgtgtgacagaggcagggagacacaggaaatgacgaggttagctcctagtcacaggacacattattgacagtttcagatattataagctgtatcccagggccctctgacttcaaagtctgggtaattttctcttttcggttcatgaaacagatctgtagtttatcccatttagcaccgtaattgtaagaactattcatgagaccagtagaacctacagaaacaagtcctgagctttgcccttctaagtagtaatagatacatatgctattaagtcagtgggagctacatcttgctcccaggtggggtgagggacagttagttttgtgtgatggaaaaaagaatggaatgggaggagacttttagttctagcagagcccttcccagctagctttgtgactaggctcttgcgacaccccggcttgggtttctttatggataatacaggggagacaggcctgcttttagtgtcacgactctggctgggtaagagttgcatggtcattttggatagataattgaaccctgagcctgacaacccctcatgcttctgccccagggcctggcttgtcaccttaatccacaaactccggccctgctttggttgatctgctcagtgtccatgtcagcttgtcaaattagagaggcagtgtgatacacagggacagataaattttagagtccagygaattgggctgagatcctggttttaccacttactagatgtgtggcaaattgtgcaaattggcaaattgtgttttaacttttttgtatctcattttcctattagaatgtggtcttatgattggtacttctgggatagttgtgaagatgagaggtagtgcaggtaaaatgcctggtggtgcattagtcaataaatatctatgtggcagatcagaaatctgcttctgctgaaggggtcggtgctgttcgttttctgaattttctgacaagactggttagrtcctccaaggggatctgctccggtcatgtcctcaggagctagtgatgcccggactgatgccatcactagtccagcagtggtactcagtctcagggatgcagtgctgccgagggaggcctcgcagcagggagtgcargaaccagcacaggagattagaaccaagttttgagcagcagcaagacgctggaaataaagtgcatcctagtgtctaattcaaacagatcatcacggtgtggtttcaacagaacattttcccttcctttmttgcatgggattcttatgtgaaataggagcaattcctacaatggtgctggccctctgggggtttcttagggccagctctgcctctccgccttctctgaacaggctgcctgggcagggctctgctttctcatttcagatctgctaacttcacatgtcacctactgccgagtcactttcctgatggaytcatgggacttttctgcatgctatttctacaaattcaytctctctccacgtaggacaaaaaacatgcttggcatgtgctttgtggagtgcgggggtgctggggtagggaggctggttagtcagaagcagctgttgagtgagcttgaacattcctggagacttgagttagctccatgattttacccatctgtcacaccctcctgggcatgtgacctccagattctgagttgaccctcatgtgggagagagatctgtgtttgagtgaagcagccctggaaactacctccttcctgatggaaacccttgatcttctcgggattggtttcyagcctcatttgccttcatattccctctgtgctctttaccaccacccagmyctgaatacggggacagggaggargtggggcagggagattcaggatggctgacccctcatcttcctcatccatcattctctggttctcatagaattagggctgcactgggccttgggggattcagcccattcttttactatagagtagcacatttcctcatcagatttttaaagtgattgacttcaccattgaggaattatctttattttgggtccctctaagtttctttcttggcttttggctaaccagaaagagcaagtctgggtttggaagggctgacgtggaagcccagcagggaatgtgggcagacttgtagcttcctgccctgtaccctgtcctctgaaaaggcctgtcctggcccagcaaatgtgctggggtcagagcagtgatggaggggctggttttgagcccctggggtttccaggttgtgccaagaccttgtttggactcagtccttggcgcggccctgtttcctgactctgcctgaggagaagggcctttcagtgcagggaactggctggccctctgttgtccttggctcagggaggcacagtctgcctgaggtgatagttctatcggaggttcttggggagcagaggtgggcaaggccttatgatgttgcatgttcccagtgtctgggcaacattctgacccattccccatttgcttttccagcgtggaagctgtagtgggactattccctatcttccttgctttttttccttcctcacgtatgttgtcctatgtgcttgtgtcctgctctcccttcccgcgtggcaacctgcctttccagctgccctgcgggactcctttttccctttgctgcccccgctcagctgggtctgacctgcttacctgaattcgaggttcccgcgctcccacggtgttgagctgctctgtcagggaggcactgccctcccaacgcgtcctcaggttctgttgtggtcgtaatcatcatagaacacatgcttattgaacatgtgctaaggtgccagctatggtgctgaagagttttatgcacatctctgtattcctgaatagtaactgtatgaggaaggtaccattattgtccctgttttatagttaaggaacttaagattcaaagaggttaaagtcacttgtcgaagttcacagaggtaggagwtattggggtyaggattcaggtccagggcagttttccccccagagcccatagaggtagaacaagaagcagcttttgggctacagagcagcttcactgtgatttacctcctcctcctactttctgcacgaccagtttcctctctccagtgacaaaacagctgaagccaccagatctacagaaggaagggggctgaaggcccaggctgagggcagttaggaggactacgtgacagggtgtggacgtgcactgtgtgtgcgtgcgtgcgtttgtgtgcatgtgtgtttgtgtgtgtgcacgtgtgtgtgtgtgtgtgctgggagaaggacaaagcttcctccagtgctaaagccttcagcaattgtatgaaaagcatgtgttgcmaaacaatccagcatcaggcgtttgcagggctttaagtaaaagctgcccaagcacgggtgtgtttgttttttccctagctctgatacccttttgatctggtttccttttttctttgggctttatctggagacgtgtgaagaattggaggccgcgctggctgtgtgttttggcggtgctactctggttagccaygtgtgccggagctctggggacttctggggggtgagccacrtggcagctccttagggctccttcttagcgagtctcccagcagatctgccagagcagcaggtcggcagcaggagcccaggtccagcgttgcaggggtggggaaaaccatttcctggctggagaaggctgctgctgggctgggtgggcaagtcctgacacattagcgatcagccaactgttttattaccaggtctcccatggagaaaacacttcgtaaatcraggagctgttacaaaagtcgaatggcagcatcattagtgcccrgctttctggaaatgtggatttcctgacagttttctcaccttctcatcttatagatttcctgtcagcctggatcatagccatgacagcctcccygttccctgkcctctctgtgcatgcacctgtgcatgtgtgtataaagacagaattatttagacaaatggctttcagaagttccgtcacagatataccccatgttcgtttacagtgagtttcacccaacatttgagtctattyactgagaaatggttgggaaggagctgaagrgccactgcaaatgattgtagatggatgtggtaactttttggggtgaaagatttagcagctcagatgataaggttagattaagatagcatttaaaatgacatctgcaaagagaggcagttttaattaagagaatctacttccaaactccctactcatggggaaactaaggctcatgtacagcggcagaatgagggtgatcagtcttctttctatttattgacagaagactctatttaataaagagtgtatgggctgcctataattccagcactttgggaggccgaggcagaaggatcacttgagcccaagaattcaagactagcctgggcaacaaagcaagaccccgtgtctaccaaaaaaaaaaaaaaaaaaaggctcacacctgtaattcccagcactttgggaggctgaggcgggtggatcaggaagtcaggagatggagaccatcctggctaacacggtgaaacccccatctctactaaaaatacaaaaaattagccrggcgtggtggcagstgcctgtagtcycagctactcgggaggcygaggcaggagaatcgcttgaaccccagaggcagaggttgtagtgagctgagatcgcgccacygcactccagcctgggtgacagagtgatgagactctgtctcaaaaacaaacaaacaaaaaattagtccattgaggtggtgtgtgcctgtagtcccagctacttgggaagttgaggtgggaggatcacttgctcaagcccaggaggttgaggctgtagtgagctatgactgtgctactgcactacaacctgtgtgacagagcaagacaccttgtattaaaagaaaaaaaaattttttaaagaaaaaaaaaaaagaatggtaaaagcccctggataaaactgaccgggggaagaaggtagaagacagaagatggtgagtttgttgtcaatttgggcttcatctcagccccagcccaccattctctaggccatggttttcttatctttcactgagtgattttttttttttttttttttttttttttttggcaaacctctgtgcatgaggtaggtggaaatggttaaccatggctgggtcctcagcctggcctgggctccatgctgcagagggggcatgggtgggagctgggagcagtgagctgatgcctgatcagtgggtcgctggacttctgaacgcaggtaagtgcatgcaaggaggcagcgtgcagcccagccctctcggggcccagattgcttcttgttaacagtgagctctccaggagtgccctgcttttttaaaaaattcacactgaaattttgtttggagcaaatgttgcttgaaacaagaaggctgttggcctccatggacagccttttgtttcaaagagcattgtgtcattgccaagtttgaccattgtaagatgtcagaatgtaacttgtcttttccgaagccgctgctgatctgctcttggtcaagcctctcaggattccagcttgagaatcatctagagtaattgtggagcctgtgrgagctaggtccaccccatgaagggcgggtgtgtgctggctcctacaccgttttttgattcttgttttcccttctcttacagtattaagggacatcagcgagagaggcagggatcttgagcagattttatctcagtacattaygttcgtcaagcctgcctttgaggaattctgcttgccagtgagttgtgttcttggtttgtttttgttgaatgtaraatttaaaatttgatgatataaacgaaggtgtgcaagtttgtggagctcccctgcctgaatctcactcctctctctgagtgatcctctgtcctgaagtcctaagagagggcagcccttggtccttgtgtcctctgtgttctccaggagccctgtcctgctgttctttctttgggtagccctgtagggtcctgccagtccttaggcaggtcatttaattcccagctagttctaggtttcttgcttggtggggtcatggtgtgagaccgtttactgagggtgtatcatatccaaggagagtcctcagccatttggatctctgaagggtctgcaatgggtgacgtatggatgcactgggtgctgtgccccgagatgttcccctctgagcctctcctgccatcaccactgagccctgctttgagcttgtctttagctcccatttggagactgtcatgccttactggaataagcttccttcccttcacccttgcagactcaccagtccttcctgtggcagctaggaattctctagtgaggtggctttcagagaaggaagaacacagagagttggccctcagcccaggaaagacaggaaggggcatgttgagggaaggctaccagagacaagaggtgtggtgtgctggggctgcagaaggagaagtatttaactcaggagaatcctactgagtcaatgagtcttctccagcttggccaaaccatggtctggctcctgaattatttatagttaagctctgagaccgggaggaaggraaggaagagcttgggacttaacctggtcttggttgagatacactgggaaggctggaatctctgaagacaytgaagatttagagtaaggctgggtattggaatttccctatttattctaacaataaacttcattctttttcttctgggaaaatatctcaaactgtctttgtttctttaaggatgttastagcttttacagcaacccatacttgactttggtttaaatgcgggacaggtggactttttgagccaactgagtaacattgatgccctatccattgccctggagactattgrgttacaagagtaggttactggaaagagaccagagggggctgaggagctgtgaacttctttccacccagttatctatctgaggacctctcctgttatttttgacttaataagaacacaaaatgaatttattattggatatcagtcatatttaactgtcagttttctacgtttaacttagttgtaacaaagctaaaaattctgcagacgttttctgggttatttctgcttgcttccactgtccagccactctttgctcagggaagatcagctcattcccctgtaagccaggaacttggacctgataaatgtctgctcagttcaagttgggtttggggctgacaccgttgcctttcagcaatcctagggcagaggctgcacagagtaagatgcccacatgcttgaggtgtgrtttatgtgttcttatgctagacttagtttgtatgccaggatgcagttacttgtagaatggtctacaaaatctcagtaaatttggaccaacaaaaaagaaaaagaaaaaagaaatatgcctctttgtggcctgactttctttctttaaaaattgggtaataatagaacctatgaactggtcatcagtgaagaatactttttctggttttaccctgtgctaggagtgaacagtgtcatgtttcagactatgtgtaaaagtccaaggtgaaccagtcccctggaaagtttgggtttttctagttcatatttgtcctagtggaatagaggcaattaagtgtttggcttcaaagaccatgttctctgcataggtcataagctgaaacagtgttcagcrttagaaatgagaacttggttgggtgcagtggctcacgcctgtaatcctgggactttgggaggcccaggtgggtggatcscttgagcccagragtttgagaccagcctgggcaacatggcgataccccctctctataaaaaataacaaaaattagctgggtgtggtggcgggtgcctgtagtcccagctactcaggaggctgaggtgggatgatctccccaactcaggaagtcaaggctgcagtgagctgtgatgatgccgctgcactccagcctgggtgacagagtgagacgctgtcttaaaaaaaaaagagagagtgagagagaatttgaataaaagctaaattcttgtaatgtagataaagtggataaaaatccatggtagatagttatcaatcgaattatgaactggttttggattaaccactcagtctggaccattttccctcactgatrcatgaaagtcttcaatccttctttctcattttcctcattccctgcttatcttctttcattcacatttcagctaaacaaggcacttccttaggtttccccaaatttctattaatagatgcattcactgtgaagttgtaaacaatattatatttgaagccttaaaaggtgctcttctgggctcgctagtatgaatgctgccctttccccatattcccttggagagggtctcgggccagttgtctcttaactgtattaatgcatattaactgtctttctccacagacaaagaagtatgctgatgtgatcatccctagaggtgcagataatctgggtgagtccctgcagagtgtcatcctggagtataatgtctgccctttgtcagtcataatttggggcaggatgtggtgaccctacagggstctgcagacatggctgccctgcttgtctgtgattgtgagccagcagaacctttccacctacacgtctggcctcaggaacaggtccctgggtgtaggcacccatgtgttacggggacagacatgcacttgtgcttctctggcagaatagagggctgtagattaccttttactatcacttcccaatgatgacacttgggtactttgcttctgaggccaccttttagcaaaagcagattccctccttgatctaatttagaatgacctgccatcacggtagccctttctaaagggagctggttgctaccattattgtacttatttttcattttattttattttactttagagacgaggtcttgctctgtcaccaagatggaagtgcagtagcacagtcacagctcatttgcagcctccaattcctgggcccagcctcccggtagctgggactacaggcttgcaccaccacggtccactaattttaaaaaagtgtttttgtagagatggtttcattatgttgcctaagctggtctaaaactcctacctcaagcgacccttccatctcagcctcccaaagtgttaggattacaggcgtgagccatagcacctggccccattgttttatttatttttttggcctgtctaggaagtrtgaatgtctctggactaggcgtagtgtggcagagttgatctgtaaaataggacctggtttcttcattctctttagaatttatttaattttccctccatttaaaaagattatttcttgagctgtttgggagtaagttatagcaataaatatttaaccctgtattttttaagaacaaaggcattcttattcatcagcagaatgcagtcattaaattcaagacatttaccattgatatgacctcttttaacctggagatgttccctatcttttgttttttaagacatttttgaggcgtacaggcccattgtttggtagaatggtcctcaatttgggtttgtcttttattttcttatgattggtttcatgagcttatacagtctgaaggaattatcccaggagagatgtggcgtggtcctctttgtgtatcacatcagaaagcatttgatgtgtattccatttttggtgatgttaaattgacctcttggttgaggtatataatttatttctaatgctaataaaagatagctctctgcattatattttttggagggaaagagggccttccatagggatgctctgtcttaggatggaaaactggaaggttccctggtggaaaggtctcatagctaattgaygtgtcagaaccatggctggttaccacgtctgcagactttggcccgagtgcttcatccagtggtgactgatcatctcctgataagaagcccattcattaagggcttactctgtggtaggcattgtctrtcttactccttagagccctcctgtgaaggaggaggatcatattagctcaggcagagccactgggaagttggatgacttgcctgcaagtggcagagccacttccctggaagtctttctactgtggttcctgcatgcccttcccccagacagactcccacactcacccctgcacccatgcctgcacccgtaacgctctgctggtctctgccccacagtggccatcaacctcatcgtgcagcacatccaggacatcctgaatggagggccctccaaacggcagaccaatggctgtctcaacggctacaccccttcacgcaagaggcaggcatcggagtccagcagcaggccgcattgacccgtctccatcggaccccagcccctatctccaagagacagaggaggggtcaggaggcactgctcatctgtacatactgtttcctatgacattactgtatttaagaaaacaccatggagatgaaatgcctttgattttttttttctttttgtactttggaacgacaaaatgaaacagaacttgaccctgrgcttaaataacaaaactgtgccaactactactggtgatgcctaattatgaatccaacgtgtaaccagttataaatacatatatatataaaaaaggatctatttttgtgtaaatgtacaaatactgtaaagctgtttgccataagtattttgcaggagggtctgtacttgagtgttttaggactggagctggaatttcaccaaggggaaattgcctgttgtgtcccagggtggggaggctcgggcatctgtgagagacagggagggtggctaaggtccagttgcttttgagtgccccgtggaacttgatgggaatggggttggaamaccttgattgcctcctctgtcacatgccactcttggagctggagcttagtgatatgtcaatgagagatactcttgtcttttttttttttcttttctttttttttttgagttgaaattaggtaaaatctcaactcaaaaatcaaactcagggaagaggcccactgaggagaacaartcttctgcattttcttcctgccctgctcccaccttctygcctctggctgcttggatagcttggtgactccttcctcaccctcctgcttctctgtctctccaagaagccagagctgcctctttccttccctggaagagattttatgggatcgcttcctgatagaagatgggaaggagagggcagaactttgcctgctgtcatatctgaagaatcactggttctttctgcatcccaggggcgtaactgatctgactccttgggctttttcctgtattgtggaatatagagtggaccattgcaggctgggtgtgggtgagggcttcggtaactgatgccggcagcagcgcctcatggagtggcaggggagctctgtctgtggaggggtagtagtttccgcttcctggaggtttgcagtgaggtgaggagagtaactttggtcagggattctcactagcagcgtcatggccaggatgctttacttatttgcaataccacctagtggatatggcaactgcagagcatamaaggggctcggaaaagcagtttttacaaagtatttaaaaggagagtatttaaatcataggtacctaagttggagcctgaggttgaaatatttggggtggagatttctagctttcctgagagctgctgcttggtggtagtgttttctctggaagtacagattcctgacattctgggtggaggggagcccaagtgagcctgaaggagttctgattatagagtccygagcctcagtttctgactgcagaagagccagagatgttcatttcattgttgaccaccctagtgcttggtggactgtgcccttagctatcccactgtggctgccattgccagaaacattttggagaaccttttcttcccattgctctcagagcctgttcgagccattcaggtaaattggtctccattattacctggtcacaccagattttcccccagactcagcaccatccagtctgattccccgtttctgggctcagtttgactctaaatctgttttgctattttaaaaagtcaaacctggtccccagcagagcttgccacccggagactttcaggagaccgtgcaggctctgaagggagctcccagtcacagcagccgcctacttggagcaagggaaggctcccaagatgcctcctttgaaagccggtgctcaccaagatcagttcaggatcaatcattatccttgtagtcatgccttgatcagttctgagatgaagcagggaatgcaggcctgggttagyatcctgaggacacagggcccctggccttgatggcactgggcygtgctcaggtgaagcccacccgtgtctgggagagccttggcttttcagtgggcagcatgctcaactttacttgaagctcccaggtgccaaaccatttagtgccttggctgtttatcccactgccttggaagatggactcctctcatctctgagcctttacctagctgcttcctcatctacctgtggtgttgggaccaagcctccaatatctctgaatagcccactcctagcttggaaacagctataagggctgccctgccccttgtcaaatgatcaccaattcttggtggcttggctggggacaatgaacagtgtctgctggggtctgtgacacactgtttctggaacaaggaagggatggaaggctctacccctccgtggcagcccagcatttggccaactctgtatctgaacttgagctttctatggaacaaacaatggtcttagttttttaagagcctctgggtctctgattccatggagagtcaggagtagaattagtggaccagaaaccatgacatttgccatctaggtactctgctgttcagggtggaggcacagatgagcagagtggggtgatgttggttgtatgtgcatagaagtcccctggctccagagccatccagtggtgcttggttctctcttcctgcccaggtattgtgtgtggaccaagtgtttaggaaacaagcatagaagcattatgtcacaggaaggcctggcctctcactccttcacactaatgagccttctactgacccaagtttctttttctcgggcagcctgggaccactatgagcagagagatgggagtctgtgtaagaaggatgcragtatcctttgatttggagtggacagagcaggtccttgcaaaggcagtgggttaaacaacgggatgtctgtgggacaggccagggaaggagggcagagacagggtctccagttcaccttgccgcagaactagcctaatcrtccctgcttctggtcttggccacttggcaatcatggggaagttgactccccgcctcacttgggcttggagctggatactygtggccacgcccaggataggttgccagagtttcattaggccgctgggtcgggctggaggcttgtgtacacctcggagcagtcgggcagcaggagggccggaagcctggttggtttgtatatgacctctcttgcccttgtgcactttccttgatttagcaaccttgacctgcactggccctcacagctgttggagggaagtagcctcttgcagggaaatattttcccctgccctggaatctcctatgtgcctgttaaagattccagggccaagaactcggcaggctgaggagcagctaggtaggtgggttatgcggttcaggactgcttctggaagggactgcctgtacttctgtaccaccgttgccctttacactttgctcagggcggggtgggggaagcattcaaacaaaacaaggaagggaactgtctggcaaagcataagtggatgcatccagagctcagtcccctttaatcttttgtctctgggcgttctgctgccttcctcataccggggactggcattccaggtcagcttggctgtggtcttagaggcaggragtgcctacccagtcctgcctcaggagcagggtgagtagctaaatacagacttaggcttttttttccccccttttaagatgcttgctcctctcccttttctttttaccaccctacctttattgttagtggttacaaagtgaccacatattatgtactttgctgtaaataaagmcagacaaaaaggmtctcgccttctgtgtgatgcttggcccagagcagcgaccgaatcctggctgtgtggcccaagtggctcaggaagggccatgctgtgcatgtgtggtgtagatgtcactgggcctgctgtcacgaagcctcatgatcctggggtgtatgtggggcagaccccaggcctcacctgggctcagatactggttcaggttagtggacttgcagttcttgtcaagtgggaagcccgggccagggtttctgggagcctttggttcttaggacaacctggcgctatgttcccctgattccatccagtttacctggcctctgccccattgccttccttaggctggtgacccagccccttccttgctcaaacaaacccttttaaagtaaacttttttgagggaggtgggtggaagatgaggaaagtttacattataacaacacaaacagttccatgttgtccacacgcagtgaatggatgtatgtgtgtgtctatccctgtttttcaaagacctaggctacccaccaaagatagatgattggcttttgtcagggtgtggtggctcatgcctataatcccagcactttgagaggccagggcaggaggactgcttgaggccaggagtttgagaccggcctgggcaagagggtgaaaccccatctctactaaacaaaaattagctaggtgtggtggcacatgcctgtaatcctagctactcgggaagctgaagcacgagaatcacttgaacgcaggaggcagaaattgcagtgagctgagatcacaccgctgcacaccactgcaacagagcaagactgtctcaaaaaaaaaaaaggaaaaaaatacggcttctctgttgtttgtggtgccctatcccctatcagcttgccacctttcttagcttctcattcaactcttctaccactgcctaccaggcacccaatgactgtcattgatgagcagagccattttctttctagccactcactccactctgacaggtgcaaccccatctgtgaatttagcaggtttttaacaggatctgccctcaaaaggtggctattttaaacaacacgcaggtgcccctgcaagagctaatgtaagcattgtcaacttctggcaggtgaagacatcgtgtgtcacagtgagtggcttgcctggtgtcacacaggcagtggtcgtgcaagccggtgcttagctgtggttcagtttccctctgcactgctcgcagtctcacctgtcccaagccgaccacctctggactttgatgctttgcttgggatgccagttggttctcacagtgtgtttctgcacctttgttgtagttagaggggaccgtggtacaggccagtaatgccccagagttgattttttatttttgtctccccacccttgtgtcacaacatcctctgagccatcctccagctccacagctaggaggagacgcctgtttgactagtgctgctttaatcaaaccctaattggggcagattaaaagaaacttgttaggacctgctgaaaggttttaaataaggggtggagaaggagacttgggatgtgggaaagtgctttgagaggatggaaccagagatggatttctgttatttggtgctggggggatgtttagatttcttttttttttttttttttttgagacagagtcttgctttgttgcccaggctggagtgcagtggcgcgatctcggctcactgcaaactctgtctcccaggctcacgccattctcctgcctcagcctcccaagtagctgggactacaagcgcccaccacgactcctggctaattttttttttttgtatttttagtagagacggggtttcaccatgttagccaggatggtctcaatctcctgacctcgtgatccacctgcctcggcctcycaaagtgctgggattacaggcgtgagccactgcgcccagcctttagatttctattttaaagcagactgtaatcagatcacttcctaaacccagaatgaagtaaagctacttgctagattttggattgtgtgtgtgtgtgtgtgtgtgtgtgcgcgtgtgtatacacacacacacacacacacacacatatgcttataattttttcatgaactaaaataacaaaataccaagtaaaaaaatgtgagttaggactaaaccaagatatatgttctcaattaaatgaatggaggtgaggggcaggagaatatgaagttgtgccttatacacactcccttttcatacagtcaaatccacgcttagcattgccttttcatattagggtgtgtttggtctagatccaatggtgcctatggactagatccaatggtgcctatgacatggtgcccagaatgaaaacagtgcagggtttaatgcagtgttcactgaattctgactgttctggtccagggaaagccaccatggcctctgcctaaatagctcacatgtgatggtggaattctatgctgaaaagcccaggagtttttcacccaagataattgtagttgtggatgttctcaagatttctctttataatggcatgtgctttctcttctgtttctgaaatttccagtttgcattgtaatgttcatattcaccttttccagctctcgttacacttttcattttatccttaaaacagtcctgcgaaatatataaggaatgtggtcatgctccagttttactgagaaggaaacttgatttaaacccaaagcaactgctgcgaagtaggacaggctgtatagtcaggttgtctgatgtgtgcctgccatctaatggtgggattcagattgcaacaggaaggttgttttggttgctgaacttggcatatgcttggctaccatggtttatgagagttgttggaatgtccctagaagtctctttttttttctggaaaaaaaatttttttaagcgatggggcaggtcttgctgttccccaggtgggtcttgaactcctgggctgaagggatggatcctcctgcctcagccttctgagtagctgggactataggcatgcaccacagcacctggcttttggaaaatcttttattaaagtcttcactaggggagatggaagctgaccctcttaatttctctattgctaccatctgttgtagtggttccacaagatggccatcataatcagtgggtgggcttgtttaaaaactttagtgggatccattcctgagaattccagggagggaatttttttttttttttttttttgatagggtcttgctgttgcccaggctggagtgcagtggcatggtcatggctcattgcaacctcagattcctggcctcaagcgatcctcccacctcaaccttctgagtagctgtgactacaggtgtgcaccaccatgcccaactatttttttatttttctagagatggggttttaccatgttggggagggaatcttttataacaaactgtacagatgaatcagatgaacaggcggggttggaaatgaggggccttgtgtatttaaccatatagaccattaaaatctatagtgttcattgtgttggggatcccatttctcccagaaatgtcctatgtgttgcttaaggagctcccctgcctgcatggagactggaaagagggtttcgaggctgcccccaagcccattcaaagccagcactgttctctaaggttgtcagaccccaggaggttctaggctggaattttcctgggaatgttccttaggatgtctgctagaactggggtgcttttagaagttagcgagcccagtggccttcaaacatgttttggctatggatcccttcaggaaatcttacctgaagtttcaacatgcaaatcagaggaaagcaaagctgtgtggttgaaactggcaaggggtgtctggagcctccccttagcctctcccttgagcttggaaaccatttaaacccaggcttctcacttcacagatgacgaaatagacccagaagcaaagtgaccaggtcaagagcccattgttgggctgtaggtctgcagtggattggattagggctttacagagaactgaacactgtttacaagttatgtttggttagttgatatccgctgagttctgtaaaagggactccaccttctcctcaaggacctcagtgttggctggcctcaaccaagtggggaggtggcttgtttggggaaatatctctggagttaaacagacctggattaaaaacttggctccctcacttaatagctggtcttggggaagctgtttggcttcagtgtctacatccataacccagggctaacctccttgttttgcctagagtattgaatgagactttacaggcagagtggcaggacagtgttggcacaagagctgcccagtgagtggtggctgattttgtgcttctagtctatccctggtgcttgggttgtgggtgaggctgtgttgtccagagatctgggagtggctggctggcttgggaaagaatacctaaactagacttctcagcagccactgctagagccctgcccctaggctaaactcagctgttgcagagaagggtttagtaaaaccaaagcaggatattttgatcagacatcaaatgggttttagagcttggcctacccctggagctctgtgcctcgcaggctgagacacacccatttctgggccctttgccaatcccgatgcccactttggggtgaggttgtgatatggaagtttggttcggggatggcgtaaggaaggatatctgttgcacatattatttagtaattttaaagggatcctacaatttaatggtgtgtgtttcaccatttcttcaaaatagtgaaaatcaaaaagtcctggcatcaaaacgaaagggtctaatattgtgtcctctgattcttcagctaaaggggctgcctagggggtcagacaagctgagggacacttggcatctttagtgagacagtctacatcgtgcctggaacccctttaggcctagtgtccgcctctattcagggtgttccagtaccctggctgatgaaaataccccatctttgtcagttggggtttatatacatatattttgtgggggagtgccatgaacccctctagcaggctacagaaggaccccttctcagaatgtttttacatacatgaaataacaccccacaaatatcaaaggaaataaattgcagtacagttaccaaaacataaagacaaatctgggatatggtaaggtatgtgttgctttagtaacacgtcaaataacaagatccagcagcaggtctaatatctaccaaaattgtgtggtagtgatgcacctgagtgatattttgcaattctgtaacaacaataatgtgttatgaaaataactgatttctgttgctgacaaacaaatacagccaatatttctatgatgcctacaaattgccttcataatggaagcaattgctaactttcagttagaggatagtgaaaagatagatgtcatttttcaagttcatggattacctgaattctgctcagtgctttatcctcaggttatgaacccctgtccagatccaaatcatcctagtcacctggagactaagttagaccgaagattttcctctttaccctgtgtgtggaatgagctgagcctcagtcagtggtgctaggcttcttgtgagataattgtactggctctggccagtagaaacaattttaaaacattcttggaaccacttttaaaagagtaaaaggcaggactgggtgcagtggctcgtgcctgtaatcagtgctttgggaggtcaaggtgggaggatggtttgaggccaggagtttgagaccagcttgggcaacatagtaagactcctggcatcgtggtgcgtacctagagtcctacttgggtggctgatgtgggacgatcacttgagcttgagagtttgagactgcaggagctgtgatcacaccactgcattcctgccttggtgacagagtgagaccctgtcacacacacacaaaaacaaaacaaaaaactcaaaacaggtgaaatttatttttgcattatattttattcatata

SEQ ID NO: 95086 - DNA, 20309 bp, Homo sapiens
caccgtgtcactctgtgacctgtcccatggatcctgaaactgcatcttggccctgttgcctgggctgacaggagcattttttttttttccagtaaacaaaacctgaaagcaagcaacaaaacatacactttgtcagagaagaaaaaaatgccttaactataaaaagcggagaaatggaaacatatcactcaagggggatgctgtggaaacctggcttattcttctaaagccaccagcaaattgtgcctaagcgaaatattttttttaaggaaaataaaaacattagttacaagattttttttttcttaatgtagatgaaamttagcaaggatgctgcctttggtctctggtttttttaagctttttttgcatatgttttgtaagcaacaaatttttttgtataaaagtcccgtgtctctcgctatttctgctgctgttcctagactgagcattgcatttcttgatcaaccagatgattaaacgttgtattaaaaagaccccgtgtaaacctgagcccccccgtccccccccccccccggaagccactgcacacagacagaacggggacaggcggcgggtcttttgtttttttgatgttgggggttctcttggttttgtcatgtggaaagtgatgcgtgggcgttccctgatgaaggcaccttggggcttccctgccgcatcctctcccctcaggaaggggactgacctgggcttgggggaagggacgtcagcaaggtggctctgaccctcccaggtgactctgccaagcagctgtggcccccagggctaccctacacaacgccctccccaggcccccctaagctgctctcccttggaacctgcacagctctctgaaatggggcattttgttgggaccagtgacccctggcatggggaccacaccctggagcccggtgctggggacctcctggacaccctgtccttcactcctttgccccagggacccaggctcatgctctgaactctggctgagaggatgctgctcaggagccagcacaggacaccccccaccccaccccaccatgtccccattacaccagagggccatcgtgacgtagacaggatgccaggggcctggccagcctcccccaatgctggggagcatccctgggcctggggccacacctgctgccctccctctgtgtggtccaagggcaagagtggctggagccgggggactgtgctggtctgagccccacgaaggccttgggctgtgcgtccgaccctgctgcagaaccagcagggtgtcccctcgggcccatctgtgtcccatgtcccagcacccaggcctctctccaggtctccttttctggtcttttgccatgagggtaaccagctcttcccagctggctggggactgtcttgggtttaaaactgcaagtctcctaccctgggatcccatccagttccacacgaactagggcagtggtcactgtggcacccaggtgtgggcctggctagctgggggccttcatgtgcccttcatgcccctccctgcattgaggccttgtggacccctgggctggctgtgttcatccccgctgcaggtcgggcgtctccccccgtgccactcctgagactcccaccgttacccccaggagatcctggactgcctgactcccctccccagactggcttgggagcctgggccccatggtagatgcaagggaaacctcaaggccagctcaatgcctggtatctgcccccagtccaggccaggcggaggggaggggctgtccggctgcctctcccttctcggtggcttcccctacgccctgggagtttgatctcttaagggaacttgcctctccctcttgttttgctcctggccctgcccctaggtctgggtgggcagtggccccatagcctctggaactgtgcgttctgcatagaattcaaacgagattcacccagcgcgaggaggaagaaacagcagttcctgggaaccacaattatggggggtggggggtgtgatctgagtgcctcaagatggttttcaaaaaaatttttttaaagaaaataattgtatacgtgtcaacacagctggctggatgattgggactttaaaacgaccctctttcaggtggattcagagacctgtcctgtatataacagcactgtagcaataaacgtgacattttataacgatgccctgcagtccccgggttctttctggtgtcacatgtttaggaagggaagtgggggggggccctgacgttcacctcgggtgcagcaaggaccgtggtccaccctgtgcactgggcttcctcgaagcgactcctcactctgaggagcccatggctcccagggcggctgggaacctgcatgtgtactcagggctccaggccacctggaagcaggattggctcccggggaaaagcagctccctgggggctgcacttgggcgcgtaggaaccatccaggacctgcggtcctcccagcccccatctgggagggctccccatctcccaacgtcccccccccgggctgttggaacccacttccctgccccttcctgctccgaagtcggctcgaagtctgagtctgtcactgctcctctgaaaccttccacggctccgttgctggcagcgtcaaccccacactccttagtgcggcatctgtgacttcctccacaaccggatgcccacggaacccacggacagagctctcggggggaaggggtgtggcaggacctgtgggggcgctgctcatcccaaagtgcccactggcaggcatctgctgctgtgcccagggacttggccgctgcatctctgcgaggacacagctggactgccctgctcccctacagggttggggtggaaggagtgccttcctggccacttgacggggggtggcccccaggagagagccctttggcacacaagtgccttagggaggagaaggctcagcacagtgactcatatctgtaatcccagcacttcaggtggctgaggcgggaggatcgcctgaggccaggagttccagtccagcctgggcaacatagtgagaccccatgtctataatttttaagggaaagagagtggccaggagttgacagaaggtgctgagggagccctgtccaccactctacccagctggcctctaaattcatgctggaaaacaacttttaaaatatacattggccgggcgcggtggctaacgcctgtcatcccagcactttgggaggctgtggcgggtggatcacttgaggtcaggagttcgagaccggcctggccaacatggcgaaatcccatctctactaaaaatacaaaaattagccgggcatggtggcgcaagcctgtaatcccagctatttgggaggctgaggcaggagaatagcttgaacccaggaggcagggattgcagtgagctgagattgcaccactgcactctagcctgggcgacagagcgagactgtctcaaaaaatcaaaattaaattggttgtacctggtgacacacacttgtagtcccagctacttaggaggttcaggtgggaggatcgcttgaggtggcagtgaactgtgattgcaccactgcactccagcctgggcaacagagccagaacctgtcaaaaaaaaagggtgggccaggtgcagtggctcatgcctgtaatcccagcactttgggaggccaaggcgggcggatcacgaggtcaggagatcgagaccatcctggctaacggtgaaaccccatctctactaaaaatacaaaaaattagccaggcgtggtggcgggcacctgtagtcccagctactcggtaggctgaggcaggagaatggcgtgaacctgggaggcggagcttgcagtgagccaagatcataccactacactccagcctgcagcctgggcgacagcaagactccgtttcaaaaaaaaagggtggaggggacatccagatggtccaacaaaataacaaaaaccggctcaagaaacaaaaaggaagttctatgtcatgttgaatggcttcaggcacagctggatccaggtgtcattacaaatctctctccatctctcagctcttgtttatgtcactgtctctgatgaactcttttttttgtctgtttgttttgagacggagtttcactcttgttgcccaggctgcagtgcaatggcgtgatctcggctcaccgcaacctctgcctcccgggttttcaagcaattttcctgcctcagcctcccgagtagctggaattacaggcatccgtcaccatgtccggttaattttgtatttttagtagagatggggtttctccatgttggtcacgctggtctcgaactcccagtctcaggtgatctgcccgcctcaacctcccaaagtgctgggattataggcgtgagccaccgtgcccggccactggtgaactcttacattgtggcatctggaaactctgggctgacattccagcagcccttgtgttcctgtcctttctcttaatagtctctgtgtcagcccctgcatcccacttttttaagtttccaccaatgggaagagtcttattcaggtgctctctgatcccaagctcaaaaaccccaagccaactggaaagttctacaaacaatgcccagggccgggcccggtggcttacacctgtaatcccagcattttgggaggcggatcacttgaggtcaggaattcaagacaagcctggccaacatggccaaaccccatctctactaaaaatacaaaaactagccaggtgtggtggctcacgcctgtagtcccagctacttgggaggctgaggcaggagaagcttgaacccgggaagcggaggttgcagtgagccgagatcgtgtcattgcactccagcctgggccacagagcgagactccgtctcaaaaaaaaaaagaaagaaaaacagtgcccagactgtggtgtccaaaacctatttccggctcccaccctgagtccttaaccagggatagggatgggttagcacccgcagtccccagagagctgcaggcttggggtgtactgaggggctgaccccaggaggacaggccaggctgggcagaagaacccacggtgtccattccttatcacgaggcctgcaagtgacgctggcgcccgagagacaaatcacgcccagtgccccgtctaggctatggcctttccgttcatgctgtaaaggtgcctgtgggtcaggcagtccaggagggcttcctgagggaggcaactcttgaatatgggggaaaaggcacaaaagtgcaatggcggtgtctgggaatatgcccctcttccttctgcccacaccggcccggtgtgcaggggggaggctggaagctgggagctgagtgagcatgtacggtgctgcgccgggttgtgggagagcagaggaagcagggactggagaaaggcgagcccaagcgagcctggtgcggtggaaagcaggaggcagaaagacctgcctgtcatcagctaagagcatccagagacgttcaccgagcaaggagccaggccaccctctgctgccggaatgaggaataacccaggctcgcaaacggaatcctgcaaagagatttccgacagggcctccaagcaacgggcaacgctgaggctcagggaagcactgccgctcgaccaaagtcctacagcgaatcaggaacaacgcctgacgcctccaaaagtgggctccaatcccagctcttcccctctgtgtgactctgagcaagacccttccccgctggacctcagtttccttcattgtaaataacgttctggcacatactaggcgcacaaaatcactggcaggtagccccgcggagcccagaagcacaatcggccgccagaccacgtggccagaaagcmccgccctaacgccgcccactccggaccacttctccgcggtcgtccaaccctcgccggaagttactgtaagtggcttccgggtctgcgcgcacagtggcggatgatgtttttttttccttcccccccccccgccctccccgcgcgcgtgcgcgccgcggccgcgcctgcgcagtgtagccgggtcagctggacagggtcatcctgagggtgcgactccgccgcgatggtgacccggttcctgggcccacgctaccgggagctggtcaagaactggtgaggacgccgacccgcggccccatccgcgctcccgcctcggcccagccccgcgccgctgcgttccgtatttgtgcgcgtttccgggggccgggccgggccgggcccaggtcccttgttgttcccggtgacagagggggaaactgaggccgagaggcggagcggcgcgtcccggcgtgaacgggacgtgacggacccaaggccaaaccccagcatgcccggctccgcggctaggccgctccaagcctcagtttccccatctctaccgggggatccgaatggtgaccccctggacggaagcgcccagaaggtgccgagtcccgatccccagcccagcactcgcggcatcttcggcctttgccactattttggtttttatgatttttaacaaggagcgtgaaagcttcagctgcgcctgagcccacgtgggcagcgggacggcataggggtggcccccatagaagccgggctgggggtggcctccgtagggttgtctggtgtttccacgtggggtgctaagaagcaaggcctggctgggtgcggtggctcccgcctgtgatcccagcgctttgtgaggccgaggcaggtggatcacctgaggtcaggagttcgagaccagcctggccaacgtggtgaaacccgcgtctctactaaaaatgcaaaaattagccaggcgtggtggcgggtgcctctaatcccagctactcgggaggctgaggaaggagaatcgcttgaacccgggaggaggaggttgcagtgagctgagattgcgccattgcactccagcctgggtgacagaatgagactgtgtcccaaaaagagaaaagaaaaaaaaagcagcaaggtcttagccgggtgcagtggctccggcctgtgatcccagtgctttgggaggcccaggcaggagaatcacttgagcctgggagttcaagaccatcctggacaacacaatgaaaccccatctctacaaaacaaaaaattatcagggcatggtggcacctgtctgtagtcccagctactggggaggctaaggtgggaggatcgtttgagcctgggaatttgagaccagcctgggcaacacagcaagaccttatctctacaaaaaaatttagagctgctgggcgcagtgactcacgcctgtaatcccaacactttgggaggccaaggcgggcgaatcacccgaggtcaggagtttgagaccaacctgaccaacatggagaaaccccgtctctactgaaaatacaaaattagccaagtatggtggcgcgtgcctgtaatcccagctacttgggaggctgaggcaggagaatcgctcaaacccgggaggtggaggttgtggtgagctgagattgtgccattgcattccagcctgggcaacaagagcgaaactccgtttctaaaaaagaaaaaagcaaaggcttatgattggcagtgtctccggaagccagaacatacttcctctatcccagactgggggacaggtcggggacagggtctgcacggtggagctgactgggaccttcaagtggaatgtgatggtgccggtggcgttttacagcgtgggtaactcaggcctgggatgaggaagcctgctcctagctgagaacccagtggcccatggtagccagtgcagcccctcccgggtgcagcaggtctgcttcttctgtgttcagtcacagcggggaccacccgtcatccgtgctttcatccaacagcaagcatttatttatttatttattcatttatttatttagagacggagtcttgctctgtcgccccggctggagtgcagtggcgcaatctcggctcactgcaagctccgcctcccgggttcacgccattctcctgcctcagcctcccataagtagctgggactacaggcgcccgccaccacgcccggctaattttttttgtattttttagtggagatggggtttcaccgtgttagccaggatggtcacgatcttctgacctcgtgatccacctgcctcggcctcccaaagttctgggattacaggcatgagccactgcgcccagcccaacatttattgagcacctactatgtgttagggacgcgccaatagaccgaacccttgtgggcrgacattctggttggtgggcaaggaaaggtaaagaaacgagacctgtggtgtggggctgacctaaaataacgaagcgggagaggaaggggtgcagacacgtgcgtgcgaggggccgtgcagggctgtgccaccaggcagtggctttgggaggctagggagcgggtctcatccccaggaggcactgtggggttgtgtctcagagtctcagacttaggactgagagggccacagttcaccagctggggaccctgcagtccacaccccttctaggccctgctggggcttgctttgaggaaggggttgtcgtggcgacgaggtcgttggtcagtgtggtcatggtctgtacgtccttcctcagtggctagtggaaatcaggttttgtgggctcttcccacactgtccaaatccacagggtcctacatggggtgaccaggatgataggggaggcggaggccggcccactgggcatatttatgagcaggcttctctggtgattaataacccagggctgggcgcagtggctcacgcgtgtaatcccagaaccttgagaggctgaggtgggtggatcccttgaggtcaggagttcgagaagagcctggccaacaaggtgaaaccctgtctctactaaaaatacaaaaattagtcgggcgcggtagtggacacctgtaatcccagcttcatgggargctgagacaagagaatcacttgaacctgggaggcgggggttgccgtgagctgagattgcgtcattgcactccagcctgggtgacagagcgagattctatctcaaaataaataataaataaataaataaataaataacttatccagaatgccatcaagacaacacgtgcgaagattcctgccctgttggtggcatctgcctccgagccaggttccaggagcagctgtgcgtgcccccagctggtgagcgggcacctggcctacacttggagastctctggtgaggccccttggggcaatgtgggcagggtttcttcatccgcctccaggaggagcaccccctaccgccccaacatcccagctgtgtgatttgctrtgayccagggaggtgaatcggatttttttttttcttccgagacagagtctcactgtcgcccaagctagagtgcagtggcacgatctcggctcactgcaacctcgacctacagagttcaagtgattctcctgcctcagcctccccagtagctgggactacaggtgcgcaccaccacaccgggctagtttttatatttttagtagagatgaggtttcaccatgttggccaggctggtctagaattcctgacctcaggtgatccacccgcctcggcctccsgaagtgctgggattacaggtgtgaaccgccgcaccccgcccggaattggattttaatttcagccctctgttggccagcagtgggacctgcaattgttatctagtgctgtgtgcataagaaatggtctcccaaaattagccgcttaaactagcaaatgctgcttatctcacagtttcagtgggtgcactgagtcaactcctcaggctctcttgtgaggctgcagtctcatccgagggtgtgaccaggcagatccgtttccacgatcactcacggggttgttggctggattcatttatttcttcctttttttttttttttttgagmcggtgtctcgctctgtcaccaggctggagtacaatggcatgatctaagctcactgcaagctccgcctcccgggttcatgccattctcctgcctcagcctcccaagtagctgggactacaggcgcccgccaccttgcctggctaattttttatatttttagtagaatggggttttaccatgttagccaggatggtccctatctcctgacctcatgatccgcccacctcaccctcccaaagtgctgggattacaggcgtgagccaccatgcccggccctcatttccttcttagctggaggctgccgtcagttctctgccacatgggtcccttcatagggcatctcacagcatggcagctggcttctccagaggcagctagaggttgcacaaaggtgcccaggatggaagccagtctttttcttttttttgagacggagtctcactttgtcacccaggctagagagcaatggtgcaatcttggctcactgcaacctccacctcctgggttcaagccattctcccgcctcagcctcccaagtagctgggattacaggcacccaccaccatgcccggctaatttttgtatttttagtagagatggggtttcaccatgtttcccaggctggtcttgaactcctgacctcaggtgatctgcccgcctcagcctctcaaagtgctgggattacaggcgtgagccaccacgcccagcctctttttcttttttaattttttttgagatatggtctcatatttaccgaggctggaaggcagttggtgtagccacagcctctgcttcctgggctcaagagatcctcctgccccagctttcctagtagctgagactactggcatgtgccaccacacccggctaatttttcttaattttgtgtagagatggggtctcactctgttgtctaggctggtctcaaactcctaggctcaagtgagcctcctgcctcaacctcccaaagtgctgggattccccttgtgagcctccatgtctgaagccagtcttttgtcacttgacctcggcagtgatgccccattgctcatgctgcgttctactcattagaagcctgtgcccggccgggcgcggtggctcacgcctgtaatcccagcactttgggaggccgaggcgggcggatcacgaggtcaggagattgagaccatcctggctaacacggtgaaaccccatctctactaaaaatgcaaaaaattagccaggcgcagtgacgggcgcctgtagtcccagctactcgggaggctgaggcaggagaattgcttgaacccgggaggtggagattgcagtgagccgagatcacgccactgcactccagcttggtgacagagcaagactccgtctcaaaaaaaaaaaaaaaaaaaaaaagaagcctgtgcccaagttcatactgtgcgagggcgtaaacgccagcaggcgggtttgctgggccttcctagaatctgctgggccttcctagaatctgctgggccttcctagaatctgctgggcccaggcaactcaggggagctctcacagcacgtgccgtggtgggcaagagcrtgagcttggaaccggaggcctcgatcctcgccagctgtgtggcctcaggtgagggcctcgccctgtctgttgtttggtgtcctcgcctgggaacagggactgtgatggcggcacctgcctgagtcctgcagctgtggcagggatggatgaatttctgcagactgcmgcagaccggacccatcatcatggtggttgcaaacttacaaacacctacacatgcgccaggcccagcctccccccagctccactcccaccccagcagccccttgagcagttactggcttcctgagagccggcagcatgggcagggcctgtgctgctggtgccagccctcagggctcacagcactgggcgggcacaggtgccaggcccgcacctcagccatcaccgctcaggacggggggccggggtgggcaggagagggtcttggagaaagggtccagagcaggcctgaccatcccctctcctctcgcagggtcccgacggcctacacatggggcgctgtgggcgccgtggggctggtgtgggccaccgattggcggctgatcctggactgggtaccttacatcaatggcaagtttaagaaggataattaattacacaaacccttcacagactgctctggtaagtttcagtgggctgcggtgggtggactgcatgatggccggatggtggccgaagagtgggttctccaggctcccagagccggggcggcagccctcactgctccccctggagagacctgcattcgagagtggggccctgggtgccccttctggcatctccggcccacgggcacagaactgtccgccccgcagccttgggttgtgtgattggggtgtgggcctcgccctccctctggacaatcccagtgagtctttgaggcaaaccttgcttccgtctcagtgggcactgcagcctgaactgggtggggcccatgttacagacagagggggaaggtggaggctggcccacagtggctggacaccccatgagctcttggaagcgcctgtgaggccctggacgcatccacgtgtttctccagcatgccagctgcccccttaaccacagtgcctgtggcatcttcccagtgcccacatgacagtcccacgtggccgtgctcttacacccccattttccaggtgctggcctgaggcctgaggccatgccactgtttgaacctgggcctcagagccctgctccggtctgtgtttctccctactgcgtggagcccggggcctgtgctgcattggtgttcctgccaggctgctgtcctgggccacttccgcagccagcttcatatggaagggacgtttctttttttttgagacggagtctcgctctgttgccagactggaatacggtggcgcgatctcagctcactgcaccctctgccttccaggttcaagcgattcttgtgcctcagcctcccaagtagctgggactacaggtgcccaccactacacgcagctaatttttttttttttttttgagacagagtttggctcttgttgcccaggctggagcgcaatgacgcgatcttggcgcactgcaacctccacctcccgggttcaagcgattctcctgcctcagcctcccaaggagctgggattacaggcatctgccaccacaccaggctaattctgtatttttagcagagatggggtttctccatgttaatcaagctggtctcaaactcctgacctcaggtgatgcgcccgcctcggcctcccaaagtgctgggattagaggcgtgagccactgcacccagcctggaagggacacttctactcaccctgcctcgtctgctctccctccaggtgcctggtggygctagctcctcccacctcagcacctgctgcatytggagcagcccaagcctcaggatggacaagaggaaacccmcagctcagcttcaggcttyttatgtttctgaaaacagcttggatattttaatgcacgttgcattaaacctcactgaaacctgmtccgtgcccggatgttgatcatgctggtggcttggttactgtgactgtagctggagtggcacaggtgacccaggcgtcctttcagctccagaatgttgcaagtctaggagagtgttccaatggctgacagaaactgcctatttgaaatggctcataagtagtatctgcagtgtgttcatccgttgctgccttaacaagtcacccacacgtagtggcttaaagcaacgaacattcactctctcacagtctgtgtcagtcggggatttgggagtgatgtatctgggtggttgtggcccagagtctctcatgaggttgcagttaagacatcagccaaggccacttcgtctgaggaaggctcaactggggctggagccacttccaagccagtgccctcacgtggctgtcggtgacagccacagttccttcccatgggggcccctacacgaagctgcttgagcatcctcacggcatggcctctgccttccccagagcaggtgaaccaagggagaggaaggagcaagccacagtgcttctatgagccaccctgagaagtctcacgtgatcacttccgccacagcctgtttatcaaaagcaagccccccaggcccagcccacgtgcagagggaggagaatgaggttctgtgttttgaagggaagaatatcagaattggtagacatttcaaactgtcacattagggatacaaaaatgaacaggctgggagtggtggctcagcctacaatcccracactttgggaggctgaggaaggggcatcacttgaaccaggagttcagtactaacctgggcaacaaagaggcccctgtctctgataaaaaraaaaaaaatgaaaaaataaaaatgaacaggtataaaaagagaatatggtacaaagtcacactccctgatacagctgcccagttttttccagctcttgccaatctctgagccgacattgcaccactgcactctagcttgggcaacagagtgagactcaaaaaaaaaaaaaaatcctagacatactgtctgcatacataagtgtgttgatggaaatagctattatatcagtctgctagggctgccataacaaaataccacagattttgcatggctcaaccaacagaaatttattttacttattcttttttaaaagacagtcttgctctatcgcccaggctggagtgccgtggcacgctcttggctcactgcaacctccgcctcctgggttcaagcgattctcctgcctcagcctcccaaagtgctgggattaacagctgtgagccactgcaccaagcctatttatttatttatttttggagatggaatcttactgtgtcacccaggttggagtgcagtggcatgatcttggctcactgcaacctctgccttcagggttcaagcgattcttctgcctcagcctcccgagtagctgggattacaggtgcctgccaccacgccctgctaatttttgtatttttagtagagatggggttttgccatgttggccaggctagtcttgaaatgacctcaggtgatctgcccacctcagcctcccaaagtgctgggattacaggcgggagccactgtgcccggccagattttgttctgatttttaaaaaaacattggccaggggtctgtgcgtggtggctcacgcaccactgcactccagtctgggtgacagagccagactctgtctcaaaaaatatataaaaatttaaaaaaaaaaattgtctgcaggctaagtgtagtggcccacacctgtaatcccagtactttgggaggccacagtgagaggattgctggagcccagaagtttgaggctgtggtgagccgtgattgtgccactgcactccagactgggtggcagagtgagaccctgtctcaaaaaagaaattgtgtgacttgagccctgaatctgtaggttaccagaccccagtagcagtgagcttcccctgcctatttctgtatctgctgtcctggtacttaagtcccgaaagggaaggcagagacttcagcatggtggcactgaggccctcgccagcccaggaggtgacaggagccagactggcggatggggtcctgtgtttgttgccacagtgagtcactggactccactgtaaagaggagcagtctcgtggtcccatcagccatttattcagtcatttatttctaccagcatccactcgaggacattttttctttttccttttttttttttttgagacagagtctcgatctgtcgcccaggctggagtgcagtggcgcgatctcagctcactgcaacctctgcctcccaggttcaagcgattctcctgcctcagcctcccgagtagctgggactacaggcgcccgccaccaagcccagctaattttttgtattttttagtagacacggggtttcaccgtgttagccaggatggtctctatctcctgacctcatgatccacccgccttggcctcccaaagtgctgggattacaggcatgagccaccacacccggccttgatgacattttttctacagactataaatcctttataaactttaattttgttgctcaagttgtcctctctgtttggccatcgtgaccccttccaaatgggctcctgtgtgcacatgatatgtcccgggtcactttttttgttattgaggtgaaattcacataacataaaattaaccattttcaggtgtgcaatgcagtgctttaatacattcacactggtatgcagccactgcgcccagcctggaattggccattttaaagactattttattgacttacttattttagacaaggtctcgctctaccacccaggctggagtgcattgtcacaatcatagcccaattttaaaaataatcttggccgggcgcggtggctcacgcctataatcccaggactctgggaggccaaggcaggcggatcacctgaggtcgggagtttgagaccagcctgaccaacatggagaaaccccgtctccactaaaaatacaaaattagccgggcatggtggcgggtgccaccataataatcatctcccttgcatgggggcaggccttgcactggctgccctagtcaagtaatcccagctacttggaaggctgaggcaggagaatcgcttgaactcgggaggcggaggctgcagtgagccgagatcgcgccgctgcactccagcctgagcaacaagagcgaaactccgtctcaaaaaaaacacaaataattaaattaaaaaaataataataatctcccagccgggcgtggtggctggcgcctgtgatcccagcactttgggaggctgaggcaggcacattgcttgagctcaggaggttacagtgagccaagatcacgccactgcactccagcctaggcaacaaagtgaaaccctgtctcaaaacataattatcatctcccttgcatgggggcaggccttgctctggctgccctagtcaggtaccacggctggttctggggtgtaactgcctggctttgagtccacagcatagactttcctgtctccttgggagcactgattcttccatggcagcccaatgccatggggcctcggtctcaggccagtaaccagctcctgagcttctcgggagacagagctggctgtctcacacctcacctcacctcacgacgaggtggggtgagcggggcatccgaccatcatccacccatccatcctgatttattcagtgcttctgtggtcagcacaacatcccgaaaatgtgcccgttccgtcggccgctgtggctcacacctggaaccccagcacttagggaggccgaggtgggcggatcacttgaggtcaggagttcgaaaccagctggccaacaaggtcaaatcccatctcttctaaaaattcaaaaaaattagccgggcatggtggtgggcgcctgtagtcccagctacttgggaggctgaggcaggagaattacttgaacccgggaggtggaggttgcagtgagccgagatcacgccattgcactcgagcctgggcaacagagcaagactctgtctccatcagtcagtcaatcaatcaataaatgaatgtgcctgtcctactccctggaacctgcagctaaagggactttgaaaatgggacgagatcttcagatgggaaagcatcccagatcgggtggacccaatgtcaacaaaagagtccttagaaccaggacagtttctccagctggaggcaggggagcacagcagctagactcagtccttgaacacctgtgcaggcccgcccagccctagccttgggagcgacgctgtcagggggaactgatggggggcagcccacccgtttccatttcaggatccctctggctggctggggaaggggttaaggggagacaacagggggtgggcgattccgcaggaaggtcctggaactctcccggccagagatggtggctggactaaggtgcagggggtggtcggggagctgggggggggtgctcagattcctggattttgagggttcaaaaagcagctggacggggcgcagtggctcacgcctgtaatcccagcgctttgggaggccgaagtgggctgatcacctgaagtaaggagttcgagtccagcctggccaacatggtgaaatcccgtctctactaaaactacaaaaattagccgtccgtggaaccagctacttgggaggctgaggcataacaacttgaacccgggaggcggaggctacagtgagccaagatcgcgcctctgcactccagcctgggtgacagagaccccgtctcaaaaaaaaaaaagctactggagggaacttgggggcgtggaaggggtggtcacgggggaagtcccccagatttggacgctcgtaaaaagctcggaagctgggagaccaggagggcggggaagtcgaggtccagtcactgggccagagtccccaagacttgggctggagaaaggtcggaggaaaggaccccactagtccgaaagcatgtccccgcgcacgcgcaccaggcggccggcagagacagggcacagtaaaaggagccgcgcggactccgggcacagctgctgggcactggcagctcgcaaggcacagcgcgcaggcgcgcacgccacttaaggccccgccccctcccagcgcgctgattggcggggccgtagaggggcgggggcatggcgccgcggctgcgcagcgcggggccccgcgcgggcgggtgggcggagcgggccccccgagcgggggctggcgagcgcggggagggggccgaaagggcggcaaagccggcgcgcgcccggctgggggcggagggcgggggcccgcgggccggaacagccgcggcaagtggcggcggcggcagcggcagcggaggcagctgaggcggcggcggcgagtgggggtccgggcggcggcggcgggcccggcggcgggccgaggagccgggcgcaatggagcggaagaggtgggagtgcccggcgctcccgcagggctgggagagggaagaagtgcccagaaggtcggggctgtcggccggccacagggatgtcttttactataggtgaatgagcgcgccggccgcgcagggcctcaacgggctcctcccagcggcctctgcggcggcctcggcgcccctgccccgggccgcggcctgggccccgcgcgtgcgtcgtgcgtgcgtgcgtgcgtcttgcgtgcgtgtgcgcccggcgcgcggaggcccagtgcgcgtgcgccgcttgttgggccgcatggctttcggccggccgttcagggactggctgccggacggcgactgcggcctttgttcgtgcgcgctgggccaggggcgcctggcggcggccagatgctaccggggggcaggggtggagggtgggctgtccctttggttcccgtgagacgcagggggtgccttcttggggcgctcctggggtggcgcggagcccgagggggtggccagccgggatttcggggagcagggctcatgggcggatcggggagggcgtgcgtgaaaatacgggttcttgggctcgccccagtcctgggaataagcgcctcagggtgactggtctcccacgcagcgttgctttttttaaaggtattccccttgactccttccgaggcctctggtcctcttgggtcgtggccccctcagggtggagacctgaggctttcgactttccgagcccacctaacggtagtctttgcgtggatgttactggtggtggaaggctttcagagacccccccgtccccaaattggaacaaggcgctgctctgaaaggtcgcagggaaccccctccgtggaacaaagacttagtcgcctgctgcagccaagtcccagacagtcggccacctgctgtttgtcctcttttttttttttttcctggctcgggaaagatgcttttgattctgggccagctttgattgcgccctccccttggttcagtgtcccgtggcgccttcaggtcccccaggaggggaaagcggaggacgcctgccatgtgccgagcacctgggtaaaggggggtgtgcggctggtccccctttttcccacagctcggggtcgtgggcaggagaccgcccaggtgagggcgggtggtttccacgagccaaggaggggcagaacgaccgctccgtccactgtgcacttcggtcctctgtggttcttgactgtcccggtttggggagataaagtgagaaaagtgagcggggaaaggatggctgtgatcagaagcaatgtgtggggcctcgtcctgcaggaggagctcagggactggttcctggaaagttggaggacagcaagagaggggaaacttggtccccaaatgtgtacccttatgagctggaaccctgtacacgtcctgagatctgcagtgacacatgctgaaatctgggagggcagatgacggggcctgaatgagactgggg

SEQ ID NO: 95087 - DNA, 32726 bp, Homo sapiens
attcctgttttgttttgttttgttttgtttttttaactttcttaatttttttcagttttcgtcacactttgtctaatactatttcttttttgtttttgagacagagtttcgctcttgttgcccaggctggagtacagtggcacaatctcagctcactgcatcctctgcctcccaggttcaagtgattctcctgcctcagcctcccgagtagctgggactacaggtgcccgccaccacgcccggctaattttgtatttttagtagagacagggtttttccatgttggccaggctggtctcaaactgatctcatgatccgcctgcctcggcctcccaaagtgctgggattacagacatgagccaccacgccctgcctaaaatatttgttttcataattaaaaacattgtttcttagccaggccctgtggctcatgcctataatcttaggactttgattttttgtttttgtttttgtttttgagacggagtttccctcttgttgcccaggctggagtgcaatggtgcaatcttggctcactgcaacctctgcctcctgggttcaagcgattctcctgcctcagcctcctgagtagctgggactacaggcatgcgccaccacacctggctaatttttcgtatttctagtagagacggggtttcaccatgttagtcatgttggtctcgaactcttgacctcaggtgatccacccgcctcagccttccgaagtgttggcattacaggcgtgagccaccgtgctggctttttttttttttttttctgcgacggagtctcgctctgtcacccaggctggagtgcagtggcgccatctccgctcagtgcaagctccgcctcccgggttcacgccattctcctgcctcagcctcccgagtagctggaactacaggcgcccgccaccacgcccggctaatctttttattttttttagtagagatggggtttcagcgtgttagccaggatggtctcaatctcctgacctcatgatccacccacctcggcctctgtacttttttcctattggctggggtcgggtcacacaatctaaactaactttggttggctaaacatttgattttttttagatagggtgggtatgtaaaagaaaggggaggccgggcgcggtggctcgcgcctgtaatcccagcactttgggagaccgaggagggcggatcacgaggtcaggagatcgagaccatcctggctaacacagagaaaccccgtctctactaaaaatacaaaaaattagccgggcgtggtggcgggcgcctgtagtcccagctactcgggaggctgaggcaggagaatggcgtgaatccgggaggcggagcttgcagtgagcggaaatcgtgccactgcactccagcctgggcaacagagcgagactctgtctcaaaaaaaaaaaagaaagaaaaagaaagtggagagaatggggaagggggtgtctgtgatgagctagaaagttagtctttttttaaaataaggaaaggaatgtaagctgatgctgataacgcttggtattgaggcgtgtctaggcatttaacaaaggcaaaaaggaaaaagaaaaagaagggaaaggaggggtactatgaattaaagaataaatgattgatcagattatttgaagagaaaccccattatatcccacaactagaacccctggcctgaagtggtccacccgcctcggcctcccaaagtgctgggattacaggcgtgagccaccactcccagtcttatttttattttattttattttgttttcttttgttttatttatttttttagagtctcgctctgtcacacaggctggagtgcagtggcgtgatctcagctcaccgcaacctccacctcccgggttcaagctattctcctgcctcagcctcctgagtagctgggattacaggcgtgcgccaccacatccggctaattcttgtatatttagtagagacggggtttcaccatgttggtcaggctggtctcagactcctgaccttgtgatccacccacctcggcctcccaaagtgctgggattacagctgtgagccaccatgcctggcctattttttttttccttttttttttttagacacagtctccatctgtcacccaggctggtgtgcagtggcgcaatctcagctcactgcaagctccacctcctgggttcacgccattcttctgcctcagcctctcgagtagctgggacttcaggcgcccgccaccacgcctggcttttttatttttagtagagacggggtttcaccatgttagccaggatggtctcgatctcctgacctcgtgatccgcccaccttggcctcccaaagtgctgggattacaggcgtgagccaccgtgccccgcccaggcctatttttttaaagacaggatctccctctgttgcccaggctggagtgcagtaatgctgatcaaagcccactgcagtcttgacctcttgggttcaagtgatcctgccacctcagcctcccaagtagctgggaccacaggcacacaccacacctgggtaatttaaaatttttgtgtagagacaaggtctcactatgttgcccaggctggtctcaaactcctgggctcaagcgatccttccaccttggactctcaaagtgctgggattacaggcgtgagcccccgagcttggtcctggtcatttcttgactgcctgtcacttggggccacccagcccgccagtgtctgacttaggcttctggctgattctctgcggccactaagctcacaattggggaaccgactccatgattttgcaacatttcgatgccggaccctgacgcattactgtgagtcgggagggtcacgttccgtttgttttttgagacggtctggctgtcacccaggctggagtgaagtggcattggtgtgatctcagctcactgcaacctctgcctcctgggctcaagccatccttctgccgcagcctcccggcatgtagctgagactacaggcgccaccattcccagctatgttgtttttttttttttaaagaaagagacaaggtctcgctgtgttgcccagggcaatttcaaaattcctagactcaagcaatccctccgcctcggcctcccaaagtcctgggattacactgggattacaggtgtgagccagcacaccggctgtgggccacattacttttgaaaagttctggataaaggccgggcgcggtggctcatgcctgtaatcccagcactttgggaggccgaggcgggcggatcacgaggtcaacagatcgagaccatcctggcgaacatggtgaaacccccgtctctactaaaaatacaaaaaaatttgcggggcgtggtggtgggcgcctgtagtcccagctactcgggaggctgaggcaggagaatggcgtgaatccgggaggtggagcttgcagggaggtggagcttgcagtgagctgagatcgcgccactgcactccagcctgggcgacagagtgagactccttctcaaaaaaaaaaaaaaaaaaaaaagaaagaaaaagaaaagttctggataaagaacaatgtcaattaaaaaaggggtcccatcagtagaggctgaaatcatgactgaaactagcttaaagcccaaagcaaaacaaaaacccgaaagaaggccaggcatggtggctcgcactatcccagcattttgggaggctgaggcaggtagatcaccagaggtcaggagtttgagaccagcctggccaacatggtgtactaaaaaatacaaaaattagccagctggagcgcagtggcgcaatcatagctcacttcagccttgaccttctggactccagtgatcctcccacctcggcctcctgagtagctgtcccagctgtcccacttactcagtgcccctccggacccagcaattctttttttttttttttttgcagagatggcagcatgtctcaaactcctggcctcaggcaaacctcatgtgtcagcctcccaaagtgctggaattacaggcacgagccaccatgcctggcctagattcatttttttagatgcagagaatctgggctttggatttaatgacttaccaaataaaggctgtcttttttttttttaaaacaaatcagcaaaacaggggctcttggctagtttgcatgaggcatccagggatggagagatgtgtatttaagctaaaaaaagaaaaagtgaaactcacagcagtctgagtttttattcagaaaaggaaaaaagaaagcaactgagagcgaaatagtttcctggaatgctggttttttttttttttttttttttttttttttttgagatggagtctcactctgtcgcccaggcaacagagtgcaatggtgcgatctcagctcatcgcaaccttcgtctcccgggttcaagtgattctcctgcctcagccttcccagcagctgggattaaaggcccctgccaccatgcctggctaatttttgtatttttagtggagatggggtttcgccatgttggccaggctggtctcgaacccctgacctcaggtgatccacccaccttggcctctcaaagtgctgggagtacaggcatgagccaccgcatccgaccttgaaatgcactttctttgaaacacgtcctcccctttctcaccataaactccctcacactctgcaggtttacctaactgtatgcatctaattatgtgattacctaaaagttccaggaacaggctgggcacggtggctcacgcctgtaatctcagcactttgggaggccgaggcgggcagatcacctgaagtcaggagtttgagaccagcctgaccaacatggagaaaccccatctctattaaaaatacaaaattagccaggtgtggtggcgtgtgcctgtaatcccagctactcgggaggctgaggcaggagaatcacttgaatctgggaggtggaggttgcggtgagctgagatcgtgctgctgcactccagcctcggtgacaagagcgagactgtctcgaaaaaaaagaaaaaagaaagaacgttttagagctaatctggagacaggccaagcacggagacccacctgcaaaatcccagagatttcctcaaggtggtctgcaacccggcccttattaggatgaggccagcctgcgcttttaagccaccaaaattcatgaacacacagagcttataatcagcacctcccctgcacacccaccattcccagttccccttttttagcccctcaccccagcctcaagtttgaaggggtttctggaggcctaaaccagctgcctccctgctgcgaactctgaaaggaagtcaccttcctttcactgcactttttcctccttactggtttgtcaagactctggcatcggagcctgagctggttacagccaggcactgtcaagctgttgggggaggggatgacaaattccctcccgttgagaaccacttggttaaacctgtccaactggaaggagtaacaaattgctcataaaatatgcatgttttggtgaaaccccttctctactaaaagtacaaaaactagccagaaatcgcttgaacccaggaggtggaggttgcagtgagcctagcactgcactccagcctgggtgacagactgaggctacgtctcaaaaaaaaaaaaaaaaatgtgcttgtttggcccaggagaggcaagaggtcttcttcacctacgttactggtgagaaaactcaaacctgagggcggcccacgccggagtgcagtaacaggcagaactggaacctggccccatcccggactcaggggacgggtgtcatataccccctctgcctcatccttcccactctgctaaccttccaaagatcccccgggttccgagttttccctggccgcttgatgggattcgaacctgcaaactcagcgctcgcccagcgcagcggccccgcctctcctcccctcccgccgcccggaggtcatgtgagcgcagtgccggagcggggcggggcgaggcggcggcgcgcagtgcctactagcaattgtagtccttgccccaccttggcctggcgaagatcccgcccctggaactacgctcccgtcgtgctccgcggctccaggcgragacgaggcggggtgaggtgggttgggccgggccggttgctaagacttkgcgaagcgctgcgctcgcgcccggatccctcaggtaagcgcgcggccccgaggtctcgggttctccaggctcagacttccccagagggggagtaggggctgacatggggggtctcggcggtgaggggcgccggccgtttgtggggagaaaacgsggggcccaggccagcctcgcgcgcgtctcgggcgggccggtgggcgacgcggggaggcggcgcgaatgcgcgtgcgcgcgcgcgcgcggcgctggcctgggggaagcctcaggaccgcgctcccccgggcctagcgcctttctgcgcgtgtgcgcccttatggtcggtgcgggagaccccgtatcctccagctgcttccggtggcccttcctcaggtcatgtcccgcagtcccctgcctctgaaccgcgctctcgcgagtttccgtagccttcgcgtccttcctccccagctctgattcgcctttatgtggagattcccctaggccttggtacatccccagaattgaccatcgttcctcatcgttacctagagtatgagtttttcaggtttttgtatcacaggcccccagttatctcccacacactaccccgaggaccgaggttccccgctgtcttgcagagaaggcctccttgtagggtggccagaaacagaggatcgactccgtggaaacaaggacggctgggtgcagttcctcaccctataaccccagcactttgggaggccaaggcgagtggatcacctgaggtccggagttcgagaccagcctgtctaacatggtgaaactccatctctgccaaaaatacaaaaattagctgggcgtggtgtcacgcgcctgtaaaaccagctactggggaggccaaggcaggagaatcgcttggacttgggaggtggaggttgcagtgagccaagatggcaccattgtactccagcctgagcaagctagcaagactcactctccaaaaaaagaaaaaaagatttttttttaataagccaggcatggtgacacatgtctgtggtcccagctacttgggaggctgaggcaggaggattgcttgagccccggaggttgaggctgcagtgaactgtgatggcactactgcattccagcctgggcaacagagcgagaccctgtctctaaataaataaataaaatacatacgtgtagcgccggccgtggtggctcacgcctgtaatcctagcactttgggaggccaaggcgggtggatcacgagatcaggagatcaagaccatcctggctaacacggtgaaaccctgtctctactaaaaataaaaaaaagccaggcatggtggtggacgcctgtggtcccggctactcccaaaggaggctgaggcaggaaaatggtgtgaactcaggaggcagagcttgcagtgagccaggatcgtgccactgcactccagcctgggcgacagagtgagactccgtctcaaaaaaaaaaaaaaatkgtgtgtgtgtgtgtgtgtgtgtgtgtgtgtgtgtgtgtgtaaagaaacaagccccaggctgggcgcggtggctcacgcctgtaatcccagcactttggggggcctaggcaggtatatcacaaggtcaggagttcgagagcagcctgaccaatatggtgaaatcccayctctactaaaaatataaaaaattagccaggcatagtggtgcacatctgttgtcccagctgcttgggaggctraggcaggagaattgcttgaaccagggaggcagaggttgcagtgagccaggatcgcgccactgccctccagcctgggggacagagtgagactgtcccaaaaaaaraaaagcccccacgcagactattggtgtgccctggaactgagcattagctgttccctctccgagttctctcccctacttccccagccttccaggctgggctgtgggtcactgcctccgagragccctcctggattctgctgaagatggtcaggcccctccatccccccattttctcttatgtacctgacagccctgccttaaaaaaaaaaaaaaaaggtagagcaggaattcccatttcacaggggtggaagccgaggcttggaggagtcaggactggtgcctgagttctygcagtcaggaattgaccgcgctgggctgaacgcctctagggcaggttggggactgggtgtgttttctgggtggacatacccaggtcccggcgcggaccttggcctcctcatctgtgggcttagataaaggcctcccagcctcctgttcaccagggttgtcaccacgcagggtctgactcacctgcctggagctatgccggttcccagcccaggctggcggccgtgttctgctgggacctgggacctgggctgcctgccctcctgaggggtcccagtggtcggtcgcctgccttctgggtgggtgtggtagagggagggtcaggtggccccctgctgttggggggcagtcgctgtgggagtgagtcgtccccccgggccatagcaggtaggtaggaggtgctctggcagttgaggccgccctggcctgggacagtcaatcagcctgaacactgtgcctgttccgggattttgacctgccctccaagggcgcggcgggcccagcctgcagtgtcccggcagctgcctcctctctgggtcgtttgtttttcatcagacagaggttgtactcttggagggacaagcgaggctgtgtttgtcttttaccctggagacagtggagtgtttgtggcctagcagggccgtgcgggcctctcggtcctggtcgcgcgtggtgtgcgttttgggagggcccagcgagtcggctgctatgggccccacctggcacggggcctcgggcagcggcagcacctggcgctgcctccgcgcttcctgctcccggctcccactgcatctccggttctgtgctttgttgaacgcgtgagcttcgggcagcgctggggccgcttcagcgtgacctccaaggccactggcctggagttccactggctgctggtcccccatctgtggggcgccccggcggctgaggcgtggaccaggcagtgcacgtcgaggagtagcacccacagctgcgcggctgcgaaatgatccagagacacatccctgtctgcgggaggagccgtccataccagcggggatgtgtagtccaggctggcagttcaggatcacccggctggagtcattttaagatcatctgcggcttagccccagcaccatctgaggcagtactgtctgctagaaataactgtgagcacacaggtagtaaggtttttaggattttattattatttatttatttgaaaaaaggaacagggtctytctatcttgcccacgttggtctcaaactcctgtgcttaagtgatcctctcgccttggtctcctgagtagctgggactacatgtgcacaccaccgtgcccaactaatttatacttttaagmaatgtgggctgggcacggtggctcacacctgtaatcccagcactttgggaggctgaggcaggtggatcacctgaggtcaggagttccaagaccagcctggccaacatggtggaaccccgtctctactgaaaatacaaaaattagccgggcgtggtggcatgtgcctgtattcccagctactaggggggctgaggcaggagaatcgcttgaacctgggaagtggaggttgcagtgagctgagatcatgccactgcactccagcctgggcaacagagtgagactctgtctgaaaaaaaaaaaaatgtgggctgggcatggtggcttacgcctgtaatccaacctcaggcctgcggtgcgagtctgtgggggcagatgcaggtgggggaaggctggccagctgagactgtggtttgggggtgttcaggtggggtggatgccagagatgtgggagccagaggcgctgtcccccagggccctgtgagcagtccctgcaggctggctgtccccacgcctgcctctctgctgtgctgtctgcccgcctagggcaggctcccttctaatgggcggatccygagagctgggggccccaccagcccttcctctccagtggagtggccctactgcctcatgtccacctgtgccagcagcagggatggtaatggcyctactatctcctgtcctcacctgtgccagcagcagggatggtaacggctttactgcctcccgtcctcacctgtgccagtggctgggatgtcttcacctgtgccagcggcagggatggtaacagtgctggtgatgtcaggccgggaggttctcacccgagagccgccttggcacactgcccggcagtcagggatgttagcaggagccccgggagtgatcccagctcttcccgcagccccactccagccagggcctcctctgtgactgagtaagcagggacaccccagtggctgcctgctccacccgacagccagggcccaccacagctgcaggaatgtggtcaagggatgggaagtcgggcccaccaggggaggggctgcgctccggggcttacgtttcgtggcttgtcttctgaggtctctcttttcctagcccttggccgactagggggygagtgtttacagaaaccactggaggtgggtgttccgtgtcagtgccaggctgtgtgctgttctgggagggggccccgtgtcccccacacttggcatgcttgctttctgtcactgcatagcagactccgtgcatctgtgggcttaatacaacacccgccagctcccggttctgtgggtcggggcctgaatgtgacatggctggctcctctctgcggggtctcaccgggctggaacccaggtgtcagccagggctgtgttgtcatctggaggctcaacgggggtggcatctgcttgcaactcacgcaggcgttggcggaattcagcascttgcggccgggggaccaagggtcctgctcagttcctggccacatggcccttctgtctggaagccaggcgccgcctgyccccgcttctgcttccaggctctggcttctggagatgcagagatcacatcagtggttgcctgggttgctgtgtgtgttgtagggtggtgagacaagttttctcttaggggtgatggaatgttctggaattttatagtggtgatggttgcacaactccaagtgtcctaagagccactgaataggacacttgatagtttttggtttttgaggtgtctttttttttttttttttttgagacagagtctcgctctgtcaccaggctggagtgcagtggcacgatctcggctcactgcaacctctgcctcccaggttcaagcaattctcttgcctcagcttcctgagtagctgggattacaggtgcgtggcaccatgcccagctaatttttgtatttttagtagagatggggtttcaccatgttggtcaggctggtctcgatctcgtggcctcatgatctgcccgcctcagcctcccaaagtgctgggattacaggcttaagccaccacgcctggcttttttgttgttttttgayagtctcgcgctgttaccaggctggagtgcagtggcgcgatctcggctcaatgtaacctgcgcctcccaggttcaaccttctgggttctcctgcaagcctcagcctccctagtagctgggactacaggtgcgtgccaccaggcctggccaattctttgtatttttagtagagacggggtttcaccgtgttagccaggatggtcttgatctcctgaccttgtgatccgcctgcctcggcctcccaaagygctaggattacaggcgtgagccaccgtgcccgggttttcattttttttttgagatggcatcttgctctgtcagccaggctggggtacagtggcacgattgtagctcactgcagccttgaatttccggcctcaagtgctcctcctgtttcagcttctcgagtagctgaaaccaccggtgtgtgccaccacgcccagctaattttttgatatttagtagaaatggggtgttgttatgttgcctaggctggtcttaaactcctgggctcaagtgatccccccacctcggcctcccatagtgctgggattacaggcgtgagccgctggtacctagccatgaattgtgcttttgaaaatgacctgtcttggctgggcgcagtgactcacacctgtaatcccaccaccaggttgaagcgggtggatcacgtgaggttaggagttcgagaccagcctgaacgacgtggtgaaatcccatctctactaaaaatacacaaaaattagtcgggcgtggtggcgcatgcctgtaatcccagttactctggaggctgaggcatgagaatagcttgaacccgggaggcggaggttgcagtgagctgagatcatgccactgtactccagcctgggcgacagcgagactccgtctcagaagtaaaaaaataaaataaaawaaaaagaaaatgatctgtcttctggtaggtgaattatatcttcgtttttaaaaaccaatggctgtttaaactctgtgcacaccaggggttagcaggacatgagggagtgtagctctgatgcggtgacctgggccggagccctcggactagcctcagctttggtggcagcacgccctgccttgtggagccacggcctcccgggacggactccccggctctcccccagccgcccgcagccgccggatgatcctctgctcccgtctctgtctcccacagtcggcctcgctgaggatggagcccgccccgggcctcgtggagcagcccaagtgcttggaggccgggagcccggagcctgagccggcgccgtggcaggccctccctgtcctgtccgagaagcagtcaggggacgtggagctggtgctggcctacgccgcgcccgtcctggacaagcgccagacctcacgcctcctgaaggaggtgtcggccctgcacccgctccccgcccagcctcacctcaagcgggtgcggcccagccgcgatgccggcagcccccacgccctggagatgctgctttgcctggctgggccggcctcgggcccgcgctcgctggctgagctcctgccacggccggctgtggacccccgcggcctggggcaacccttcctggtgcccgtgcccgcccggccgcctctgaccaggggccagttcgaggaggcccgggcccactggcccacgtccttccacgaggacaagcaggtgaccagcgccctggctgggcggctcttctccacgcaggagcgcgccgccatgcagagccacatggagcgggcggtgtgggcggcccggcgggcagcagcgcggggcttgcgggccgtgggggccgtggtagtggacccggcctcggaccgcgtgctggccaccggccacgactgcagctgcgcggacaaccccctcctgcacgccgtcatggtgtgcgtggacctcgtggcgcgcggccagggccgcggcacctaygacttcagacccttccccgcctgctccttcgccccggccgctgccccccaggccgtccgcgcaggcgccgtgcgtaaactggacgcagacgaggacggcctcccctacctgtgcacyggctacgacctgtacgtgacccgcgagccctgcgccatgtgcgccatggccctggtgcacgcacgcatcctgcgcgtcttctacggtgcgccctcgcccgacggcgccctgggcacccgcttccgcatccacgcacggcccgacctcaaccaccgcttccaggtgttccgcggggtgctggaggagcagtgccgctggctggaccccgacacgtaggcgccgccctcctgcctccggacccttcccgctcccggccgtggggcgcccctcctggacttccgggcctcgatttcttccgcacaagcctgaccgtggatttcagggacacataccgcctccagcggggagcacgggtgctgccttccgtgcggatcgagctttcctggactcggtcattggggccaccccgtgccagcggtgcccttctgcggccgcccttgctgcgtttgtgtcccctctgtctcgcgggccgggaaactgctctgatgggaaaataaacagcccaaaaccaagtgggtgtctgttaggaggtgtgtgcctttgtggccagggtcccgagtggggtggggtctgtacagggcctggtggctcagccggaggggacctgctgagccacgtgtggtcagagacctgggctgattctggggtagagcaaggcccccagctgctgcctcctttcccgcttctggagtcctgatggttccaggcgtgcctggcccaagtgtgtggacactaggcgtagtccacaggscaccgaccctaaggaagggccctgggatttcgtgtccttcacaagtggcaacaggggaccccaaagggctgatgctagtcggtcacagcacagtgaggactagagccgtttttgcagaacttggagcaggacctgtgggtccacccggcaagtgtccattgcctgaccatgtgggtgcagctttgcctccagacacgcctgctgtgagcccccagcccataggggaggggatccggcaggtgggggctctgcgtggggagctcatgcagtggacagaacaccactgctggccaggagcccgccaggcctgcagtgggggagtccgtgcctgggggtgggactgaggtgggctggagggtccckgatggggccagagccacagcgtggagtgaggaggtgggagccgcagaggcgtgcccagttgagtggtagaggcagcatttgggcctccttcatgctcaggtgctcagctccttcccctgaggggcaggaagtcagggaggagggagtgagaggtgggaggtggcaggcgggcggaggggaagatgtcctgtcccaagagccaggggtgccccaccccacggtgacatgttcctgaacgggttgtgagtggagggctcagttcctgggaactgcctcacctggactgtgggcgggaggcagctcctggccccgtgcccgccccctcgggcctgttcccctgccaggatctgggatggttcacaccccactggtctgtgatgcccagtgggcagcaggcatgcccctgctgggctggcccacctcccgatggcaggtccgcccccaggatcacggaagcagctagatccactcagtcgtgggtggatgkcaggccaggtggggctgctctggtgggtgagctcatggggttccctttcagaacggccagggtgccatgcggatgcgatggggtcttaggccctgcagcgttcaccttgtggygcccaccccttgtgggctgaagccgggatttgggggacgcaggggcctaggacagcggggaaggggcatcctggctggggcggtgggtgggaggggctgcggccagccctgcccgttttgccagcatgggtggtgtgcactggagcygaggggagggggacctgtggggtaacacattgggtcgagtcaggcctgtggctcccgcttagcccactgctgtttccagagcacagggcacgatgaagggcttttcagccacggtgggtgggtggttagcgctctgcccagggcrgctcagggttccctgactgtggttgtcttccttccaggcggctgcaggcttcagcctgcgctggttggtgaaacagagatgtcaggtgagtcctgcctgcctgggagcctccagcagcgtgggcgggagggagatgccagcagttcccacaggagccctcggtcctggccgttggcacacagtgtcctcctggcccacctggcctctgactcctcgggtcccgtagcccagcacagctggagtcacgcctctgctgggggcaaaggacagcagagccgcctgtgtatccgctcggacgcctcactgacccgaagcacagcccagccgggtgcccctgccatcacagctgctctttccttatagcagcgggcgtgttctcatgtgccccggggtccctcacccactcatttactggcagccttccccagtggkgcgtaagcccctgaggacagggcctcttgctgtctgactccccatctggccctcgcaggcgcccagggacacttcctcaggcagtgctggctgagcagaagctcctggggggctcccagtgccacgctgagtgccccaaaggctgtgttcccatcttgatccctggaacctgtgagtgggacctcatttgggaatatggccttaactccggacgtgatggagttaagataaagtactggagcagggcgagctctcatcccagtgcctgctgtgtttataagaagagatggaggccgggcacggtggctcacgcctgtaatcccagcactttgggaggccgaggcgggtggatcacgaggtcaggagatcgagaccatcctggctaacacggtgaaaccccgtctctactaaaaatacaaaaaattagctgggcgtggtggcgggtgcctgtagtcccagctactcgagaggctgaggcaggagaatggtgtgaacccgggaggcggagcttgcagtgagcgagatcgggccactgcactccagcctgggtgacagagcgagactgtctcagaaaaaaaaaaaagagatggtccgggcgtggtggctcacgcctgtaatcccagcacttttgggaggccgaggtgggcagatgatgaggtcaggagtttgagaccagcctggacagcatagtgaaaccccatccctactaaaaatattagctgggcatggtggcacagcacctgtagtcccagctacttgggaggctgaggcaggagaatcgcttgaacctgggaggcggagttgtggtgagccgagatcacgccactgcactccagcctgggtgacagagtgagactggatctcaaaaaaaaaaaaaagacatggagatacaggaggagtcgtcgtggagatggaggcagaggccagagctatgcggccatgagccaagggcgctgggatcccccagaagctgcttgagagaggcaggaaggctccttccccggagcctgcagagggagcgcgttcctgagacaccttgatctcagatttctggcctccaggactgttagcagataaatatttgttgtgttctttgttttgttttgagacagggtctgggtctctcccaggctggagtgcagtggtgtgatcatagctcactgcagctttaacttcctgggttcaagcgatcctcctgcctcagcctcccgagaagctgggaccacaggcacgcaccaccacgcttggctaatttttgtagtttttgtagagttggggtctcgctaggttgccaggctgatctggaactcctgggctccagcagccctcctgcctcagcctccaaaagtgctgagatcacaggtgggagcccccacacctgggcagtttctgttgttctaagcctcccagtcggtggtggtttctcacagcagccatggggaacggaagcgtccccaggccacagcctccccgcagtgtgcrgactcggcctgctgagcctgcatgttggcgtcccygcctgccggagggaatgatactaaatgcagcctgctgcagccgcacccacactaaacatggaggagggctacgaagagtagcagggccctgcatgaagggtgacacgtaaatttaaaaaacaatttcggccgggcgcggtggctcacgcctgttatcccagcactttgggaggcagaggtgggcggattatttgaggtcaggagttcaaaaccagcctggccaacatggtgaaacctygtgtctactaaaaagaaaaatccaaaaattagccgggtgtggtggtgggcgcctgtaatcccagctacttgggaggctgaggcagaagaatcacttgagcttgggaggcagaggctgcagtgagccgagatcgcaccactgccctctagcctgggagacagcgcgagactccgtctcaaaaaaagagtcataaacttagttccttaaaacagtgaaatcagttatctgacagttctggagaccagaaacgctaacatcaagctgtaggccggttcccgccttgcccagcgtctagaggcgcccccatccctccactcagggcccctttctcccccttcacagcctcagcgcagcctcttcccgtttctctctgactcccaccctcccgtctcctctcgtgaggctgccacgaggaccctctcctgtctcagcgtcctgccctcaatcccaactgcagagtcccttctgccatgagaggcaacccagccttgggtcgaagggatgaggtggggcctccttcaagagacaaagtctggttctgtccgtgggttctctgtccctacagaaaaggagaacaacttcccgccactgcccaagttcatccctgtgaagccctgcttctaccagaacttctccgacgagatcccagtggagcaccaggtcctggtgaagaggatctaccggctgtggatgtgtgagtgcgcctgggggcaggaggcgggaagcgggaggcagggctccccgagggagggagtggcattcaggcaggggcagcccgtcgggggcccaccgtctacygaagccgtcctgggcctggtggtccctgcggtgaacgaggctggtgtccaggccccagtgtcttggcttgcacagttcatcctcgacatggggtcacygggctggggaggcggacagcgggtgccccattgctgggcccatgctttcccacggccacaccctcccgtgcctgctcatccgtcctccctctctcttcgcagtttactgcrccaccctcggcgtcaacctcattgcctgcctggcctggtggatcggcggaggctcggggaccaacttcggcctggccttcgtgtggctgctcctgttcacgccttgcggctacgtgtgctggttccggcctgtctacaaggccttccggtgagcagagctgccgggggccgtctgcacccagagggaaccagggcccactctgcaccccagtcccagcccagctgtgaggagctgtccctttctctgcccagtgtgaaagacagttcacatctgggggtggcaaactgtggcccacaagccagagccaactactgtctgttttgttttgctttctagtaattttggctgggtgcagtggctcaggcctataatcccagcactttgggaggccgaggcaggcggatcacctgaggtcaggagttcaagaccagcctggccaacatggtgaaacgctgtctctactataggtacaaaaattagccaggcgtggttgcgggcgcctataatccyagctactcaggaggctgaggcaagagaatcgcttgaacccgggaggcagaggttgcagtgagccgagatctcgacactgctctccagcctgggcgacagagtgagactccatctcaaaaaaaaaaaaaaaggaataaaatagagcctccgctctcaccatctctgactggcccgttcctctctaggcgcgtctgggagaagccagggctgtggtaaccgtcgtgttttctgtccctccccagagccgacagctcctttaatttcatggcgtttttcttcatcttcggagcccagtttgtcctgaccgtcatccaggcrattggcttctccggctggggcgcgtggtaagcctctctctgatgggcrtggtggctgtgatgtggctcagctgccaggttgtgggcctgctgggaagccaggcggccaccggagcgtgctggtccgggattgtacgcgctctcctagggaggggtctgagctcaccctggcagcgcccgcgtcctcgccagcgcccgcgtcctcgccagcacccagccatggttcgcgattgtaggcactctcctagggaggggtccgagctcgccctggcagtgcctgcgtcctcgccagcgcccagccaggcttgtctcctgagtgttgatcacacccctgacccggggtctgggagccagttcctggctgctgatgtttctgcacggatcgctgcaggaggaagacctgtacatctgtaaaaacacacatacctggtgctgttaccacacctgagaaactcacagtcactctctaaggctgccaggtgcccagaagtgtttgtgttggtgtcttaaatttctgccttttttcttttcttttttttttttttttttttgagacagagtcttgctctgtcacccaggctggggcgcagtggtgcaatctcagctcactgcaacctccacatcctgggttcaagcaattctcctgcctcagcctcccgagtagctgggactacaggcgcccgccaccacgcctggctaatttcttttgtattttagtagagacggggtttcaccgtgttgcccaggctggtatcgaactcccgagctcaggcaatccgcctttctcagcctcccaaagtgctaggattacaggtgtgagccactgcacccggccctttttttaaactattattatttttttttgagatggagtcgctctctgtcactcaggctggggtgcagtgacatgatcttggctcactgcaaccttcacctcccaggttcaagcgattctcctgcctcagcctcccgagtagctgggactacaggtgtgtgcccccacacccagcaaatttttgtatttttagtaagagacggggtttcaccatgtgttggtcaggctggtctgaaactcctaacctcgtgatccacccgcctcggcctcccaaagtgctgggattacaggcgtgagccactgtgcctggccaaatttgtggctttttaaataggctttttattttggaataatttgtaattctcagttgcagagagtgactgttctcgcccacgtccccgacgtgtctcccttgtccttggcacggcgggagctccccacrggtgacgctgctcacggagccgtgggtgcctttggtttcctgggctcccrttagcaagctcctgttctggggttcctgccccacaagactgcggtactctcaygccagtgcacagatcagaatccagataaggtcccaggtttcctgggatggtgactcctctcccttcagggcccctcgatctgcaggcctctcccctcctgcacctgcgcctggcgccaggccctccagggtggctrggatctgtggtttgtgcacccctcggatgtgccgctgaagctggtctgtcacctgccaccccaagagcctgagtgacgttgccccagggatctgagttagagtcatagtgagcgtgtgcctgggactcccagctctgccagcctttggggtgcttccccctcctgcagaggctgtggctgcaggtcaaggcactgctcgtcatcctccgagtcctcctgagctcccagctgccrgctcggctcccactggcccttccctgggctccagtgcctcctgtgagccgcctccccggtgcgtccccagctctcccaggctgagctgggtggacaggcctgtgcccgtgttgggtggtcctgagatcccggcatgaggtgagtgcccacatgtgaccctcagagacctccctgccccctcggccctcgtgcacgtgcggcagcagcgacttggctcttctcattggagcctgggtcatctcccgcaggtcacgggagaagctgagcatgcggtccctgcccgaggtggacagaaggtgaacgctcttgagaaagaaacccagcgggtcttaggagagcccggccccccttgtaatgagagaaatcaaaccacagcgcacagcgacttcatgtccaccgttggcttagtgaggccccacgctcagtgcgctgctgtggggcgagaggggacagccccgctctccctgtcctgggcggcttcaccagcgccacctccccacacactctgtgcactgctgtggggcaagaggcgacagccccgctctccctgccccgggcagcttcaccagcgtcacctccccaggggtgacgcatgcccgaggccatgagccacggcagcatctgtggtggcagaggactggaaactccagagaaatgacccccagcggggcctagctgtgtagatggtgagggtggccacatggcggcagccaggtactgaggacacggtgcagcaggggcccccggtgggccccgccaggaatcggacatcagcgggcgccgcagcctctaagcggagcatgcagcccactgacagtgtgctgggtgcctccctagacctgacacttgcatgcgggggcgtgcgatgctggccagtgggaagctgcgggggcggcggcaggagtcctcaaatgcctttgccgcttttcataaatctaaaattacatccaaacagaggtttacttttttaaaaaataaaagaggccaggcatggtggctgacgcctgtaatcccagcgctttgggaggccaaagcaggagaatcactgcttgaggccaggagttcagactggcctgggcaacatagggagaaaccatctctccagaaaaaaaaaaagaggaaggaatgacccaaagaccatgcagcctgtgatgctgtggaggctccaagcaggcgaacacaggacaggccagcatcttgcagggacgcggcggggggtaccgcgtgtgcgtgcatatcacgccccgtgcatgtgtgtgcataagctccccggacacatccgggggtgtgggtcctgcgggctgcctgtgcaccagggaggggagtcagcaggagagagactgtacgtcgtgcctgcctttaagttccctgaattttaaaccctgtggtttcatcacctgttaagacaaaaatctcaaaatgactgttttctgcctcctgggtctcaaaggcaggtgcaatgcccagaggctggtcctgcacagagggacccagggcgtgctcgccttcccagtgtcccactggtggctgatctaagcagtgctttccctcgtttttttattttgagacagaatcttgctctgtcccccaggctggagagcaacggcacgatctcggctcactgcagcctcccgcttcagcctcccagatagctgggattacaggcatgcgccctcatgcctggctaatttttgtatttttagtagagacggggtttcaccttgttggtcaggctggtctccagttcctggcctcaagtgatccgcccgcctcggcctcccaaagtgctgggacgacaggcgtaagcctctgcgcccggcctcctcattgtttctaatggtccctcagtgcccaccgggtgatggtggcagattttccatccgcatkgctcccggacatgcggatgtaggtttcagcagttcccatcattagacacagttgccgtaggctgggttcttagtagcaggctcagtggggcctttgagtctttccatggctggtgcccgccggactcactgagggaaactaatggggaagcactggtctccattccctgcacgcacagcccactgctgcgatggtgaagggataaggttgtgttcacgcgtcgaagtttgtgtccactgcacacgcggctcactgctgcgatggtggagggataaggtcgtattcacgcgttgaagttggtgcctctcagtatcgctttatgtttgttggccacttggtsgtccttgtatgagctgtccactccttgttgattggccagagctctttacatggggaggaccatgggccggaccatgggccctcatccagcaggtgtgcaggcacccacgcactctcttgtcccttgcagcggctggctgtcggcaattggattcttccagtacagcccgggcgctgccgtggtcatgctgcttccagccatcatgttctcygtgtcggctgccatgatggccatcgcgatcatgaaggtgagtcctyggctttgtgacgtccagcccttaccccttctccatgaacctcgtcacccaactgtcccaggtgggtgaacgtcgaggagcygggccctctccccacggtgtcacgcaggccgcacttcatccccagcagtgagctgggatgacagcaggaggcactgtcaccagggacactcccagggacccagcgccygggttcctatggggccagtcctgtggccccctgggccgggagtccagactccagagggaagcaggggttgtgtgtaaaccgcagtgtttgcaggaacagctgaggccctggagctgtcctgtcagtgagggtggggccccttgcaggttcccggtcacagtttccatctgaagatagcggaagtgttgagctgggctcrtaacagaaactttcagttacagcaaaatgcttttttttttttttttttttttttagacagagtctcgctctgtcacccaggctggagtgtagtggtgcgatctctgctcactgcaagctccgcctctggggttcatgccattctcctgcctcagcctcccgagtagctgggactacaggcgcccgctaccgcacctggctaattattttgtttttgtatttttggtagagacaggttttcaccgtgttagccaggatggtctcratctcctgacctcgtgatcctcccgcctcggcctcccgaagtgctgggatgacaggcgtgagccaccgtgcccggcctattttttatattgtagtagagacagggtttcaccatgttgtttggactggtctcgaactccagagctcagacagtctgtcygcctcggcctcccgaagtgctgggatgacaggcgtgagtccccgygcccggccgccatgctcattttctgycttctgcctccctgtcctctgtccttgcaggtgcacaggatctaccgaggggctggcggaagcttccagaaggcacagacggagtggaacacgggcacttggcggaacccaccgtcgagggaggcccagtacaacaacttctcaggcaacagcctgcccgagtaccccactgtgcccagctacccgggcagtggccagtggccttagagggagcctgccctgcccccaccgcccaccacctcctccccttcattcctgctgctacccctggtcccgagggctgggagtacctggggccccatccccccagctgggatggtggaagccggtggtggccacggaccgcccccctcctgccagggccacagaacccgtgttcatctcatccgagagcggagttcctcacaagcactccccagcagcccttggcctctgccgtccacaggacgccctcttgctcccggaaacgtgtggtcacccgccgtccactgcacggctggtacggccttgtcttcaggtctcgaggcctgactccgggggacaggtggcagcaggtcggccgccctcccgtcctccmagagctgctggcgctgaggtcagagcgggtctgatggggagctccgtctcaccggccacccgccgtcaccatggcagatgcccttggccggaactaataagaggcgtcggggccagcttccggtcccctgcagtgatagagggcttggtgcctagctgagtcctcgctgtccccgccatcccctgatctgtgcggctccagcctcgccccctccccacgtgcaccatacctggggagttcctggtccagggtatcctggggccaccctccctgcctccaaaacagggatccctggcaggctgtctttccacgcccctgagttcagagtcggggacccaggccaggtcgggagcacagccgctccccaaacccagcaaaccggcagagagccggtttcccagcagccggagccctgcaggagaggcctttgtgttttgttttgttttgttttttctcttttgagacagagtttcactctgtcgcccaggctggagtgcagtggtgtgatctcggctcactgcaacctctgcctcccgtgttcaagcagttctcctgcctcagcctcccaaatagctgggattacagttgcctgccaccacgcccagctaatttttatatttttagtacagatggggtttcaccatgttggccaggctggtctcgaactcctgacctcaagtgatccacccgccttggcctcccaaagtgctgggataataggtgtcagccaccgcgcccagcctggagtggccttttatgagaggggacccgtcaaatctgtgccttatggaggggtccggcagcggccacaattgtcttgtcccctcaccccccaactccccctggaacacctctcccaggcaagacattttcacagcaccattcacaacggttgggccaaaaagaaacttttccttcatcatttcctgcactcgctgaccacaactttggacaccccaggctgccacccctccccacccgttcacccccaggatgctgttgctgtaggacgcctgctgccctggagccctccccaggatgtgagccagtcccctcgctggtacggaatgccgctgggtgcccggaggcggccatggtgtctcgatggacggcagccaggatggagcacccatgggtctcacggccatgcttcagggtcttcaggtcctgcccccggccagtctgccaagaggcacccccttccccagcctctcgcctgcactgatgcagacaaaatctcacctggcaggcccaacccccccccacccctccmccgccgtgtgtggcycctcgccgcatcgttggggttttgttaygtgaaaatatcctggaaataaatacatgtttctgcacttagagccagggacctgccgcgtttgtgctgtgagcatgtgtggttcccccaggccgtcttctcccttgggagacccctcagcatatggcctctggcaggatgcccccctgcagcgcctcctcccacccaggccccgggtgccctgtagccaggtgtgcccagggctgaccctgccatcctggccaacgtggtgaaacccggcctctactaaaaatacaaaaattagccgggcgcggtggcgggygcctgtagttctagctactcaggaggctgaggcaggagaattgcttgaacccgggaggcggaggttgccgtgaacccagatcgcgccactgcactccccaccggctcaaaaaaaaaggaaacttgcacagatggaaagccagtgtcactggccctacgtaaaaagcaaacatcggccagacgcagtggctcacgcctgtaatcccagcacgttgggaggccgaggtgggcggatcatctgaggtcaggggttcaagaccagtctggccaacatagtgaaactctgtctctactgaaaacacaaaaaattagctgggcgtggtggcacacgcctgtaatcccagctactcgggaggctgaggcaggagaatcgcttgaacctgggaggcagaggttgcactaagccaagattgcaccattgcactccagcctgggtgacagagtgagactctggagagaaaaaaaggggggttgtggggtgtggtggctcacacctgtaataccagcactttgggaggccgaggcaggcagatcacccaaggtcaggagttcaaaaccagcctggcccacatggtgaaaccctgtctctactagaaatacaaaaattagccaggtgtggtggcaggtgcctgtaatcccagctacttgggaggctgaggcagaagaatcagttgaacctgggaggcagaggttgctgtgagccaagataacgccactgcactgccacctgggtgacagagcaagattctgtctcaaaaaacaaacccagccgggcgcggtggctcacgcctgtaatcccagcactttgggaggccgaggcgggcggatcacgaggtcaggagatcgagaccatgctggctaacacggtgaaaccccatctccactaaaaatacaaaaaattctccgggcatgctggcgggcgcctgtattcccagctactcgggaggctgaggcaggagaatggcatcaacctgggcggggagcttgcagtgagcggagatcgctccattgcactccagtgtgggcgacagagcgagactctgtctcaaaaaaaaaaaaaaaaaccaaaaaacaacaaaagaataaacttactacatgttaatattttttttcaaatactttgttttttgagaccgagtctcactccgtcgcccacactggagtgcaatggcgcgatctccgctcactgcaagctccgcctcccgggttcacgccattcccctgcctcagcctcccgagtagctgggactacaggcgcccgccaccacgcccggctaattttttgtatttttaatagagacggggtttcactgtgttagccaggatggtctcgatctcctgacctcgtgacccacccgcctcggcctcccaaagtgctgggattacaggtgtgagccacggtgcccggcctcaaatacattttttaaacaggaggatgggtggcatacttttttaaatgtgtgcaaaactcttgaacatctggcttcatagaggacaagagggatggctcagcagctctgtcgcaaaagggtgttttaccacaacaaagattgagggcaaatggtctatctaggatgtgagcccaggaagtaccgaaggggtgtggggatggggagtggcccatagggaggcatgaacagggaggttacagctccaggctgctggagctcagtccctctgaggatctggctcaggttgtcgtccggaggtgagggagctggggtatttatcctccaactcccctgcaaatggtatgggggctggggaggcttagctccgccctcaggtagagagtcatagatgctggtctgtgtgtgttgtgcttgtgttgcgtgtgtatcgtatgtgtgtgtgtgtatgtgcatctgtgtgtctatgagtgtctgtgctttattacagattgaattaggtcctccccaatacccatatgttcacaccctaagccccaggacctcagaatgtgactttgcttggaaataaggtcattgaggatgaaattatatagttaagatgacttcattctggagtagggtgggcactgatccagtgtgactggtgtcctttacataaaacaggaaatttgagctgggcccagtggctctcacctgtaatcccagcaatttgggaggcagaggcaggaggattgcttgagcccaggagttcaagaccagccttggcaacatagtgagaccctatatctacaaaaaaaattaaaattagccaggtatggtggcatgcgcctgtagtcccagctactcaggaggccgaggtgggaggattgcttgagaccaagagtttgaaaccagtctgggcaacatagcaagatctcatttccacaaaaaatacaaaaagtgtcagggcatggtggcacatgcgtgcattcccagctactcaggaggctgaggtgggaggattgcttgagtccaggagattgaggctgcagtgagctgttaacggcgccactgcactccagcctgggtgccagagagagaccctatctcaaaaaaaaaaaaaaaaaaaaaaaagccaggtgcagtggctcacgtctgtaatcccggcactttggcacaccgaggcgggtggattatctgaggtcaggagttcaagaccagcctggccaacatggtgaaactccgtctctactaaaaatacaaaaaattagccaggcgtggtgatgcacacctgtaatcccagctacttgggaggctgaggtgggagaatcgcttgaaccgggaggtgtaggttgcagtgagccaagatcacaccactgcacttcagcctgggtgacagagcaagacaaaaaaaaagggaaatttgggacacagacacacacaggacgaacaccatggtgaagctttcgcaagccaagaacgccggtcaccgccaagagaggcctgggacagagtccactcgggctcagaaggatccagcgtcgctcacaccttcgtctgggactcgcagccccagaaccgagagagaataaacaggtgtttgcgccgccgggtctgcggtacctgtcaaggcagccctagcaaaccgatgcgtgtttgcatgtgtgaatgcgtgtgtgcgtttacatgttcaggagtgacaggtgctgcagggtactgacggggaccgcagcctctgctgtgcgtcctaaatatcacgcccctctttctgcaaactgtcgccccagtcactgccccgtcttcccttcggaggtcgaccccgccgccctccgctcggccgccagagggcgacctcggactccagtcggacgggctctgccctggctcccgggcttcaggttctaatagaaactctcgcaggggtgggtcacgcctgtaatctcagccctttgggaggctgaggcaggagaatctgccgggaggcagaggttgcagtgagctgagagcgcaccattgcactccagcctgggcgacaagagtgaaactccttctcaaaaaaaaaaaaaaaaaaagaaaagaaaagaaaaaaaatggggagtgtccgcctctggacaaggtgcagccggcatgatgtggctcctgagtggccacgtccccttcagggtcacaggggcgatccagggaatgaggaaaggaagacggaactgcaggcatggcgggggacctggcgggcagctgggggcatcgtgtgcccccccccatggctactgcccctggtggtgagtccccggggtgggcatcactaaaagagtgactgtgatggcttcattgggctgggccctccaggctccccctccacccctgccactgagctccacgcccggacccaggcctgggggcactgcagggacggatcctcaaccctctggcttcagcttccatcccagcggggtccagctggggacttgcaccagggggcagggggctgggagagtgagggaggaagagtgagggaggggaagtgaggccgattgtcggtccctggcctcctccctctagaggacagcctgtccatgggggtccctctctgcagcccatcccccacctgtaaggcgcccactgttgccaaccccaggggctgtgtcattccgcgttgctgcccctcaccctgcctacgcctccacaaaccccactgctaaatccttcttccacatgagggagccatcgccttccaacagcaatttaggagggtgaatgtgatgtttgggatgtctcacgatttcccagcatgaacgcacaatctcaagctgtgtgtgtgtgtgtgtgtgtgtgtgtgtgtgtgtgtgtgtgagagagagagagagagagacagacagagagactcactctgtcgcccacactggagtgcagtggcacaatctcggctcactgcaacctccacctcccaggttcaagcgatcctcttgcctcagcctcccaagtagctgggattacaggtgcacgccaccaaccacacccagctaatttttatatttttagtagaaactagtttttgccatgttggccaggttggtatcgaactcctggcttcaagtgatccacccgcctcagcctcccaaagtgctgggtctacaggcgtgagccacccagttgagtcatttttttcttttctttttttttttttgagacggagttttgttcttgttgcccaggctggagtgcagtggcgtgatctcggctcactacaaccaccacctcctgggttcaagcaattctcctgcctcagcctccagagtagctgggactacaggcatgtgccaccatgcccagctaacttttgtatttttagcagagacagggtttctgtttctccttgctggtcaggctggtctcaaactcccaacctcaggtgattcacccgcctcagcctcccaaagtgctgggattacaggcatgagccaccatgcctggccccccagttgagtcatttccagtcttctgagccccagaaacttgataagatgtctgttgttttatttattaattttatttttgttttatttatttatttatttatttatttatttatttatttgagatggagtcttgctctttgcccaggctggagtgtagtggtgcgatctcggttcactgcaacctctgcttcccaggttcaagagatttccctgcctcagccgcccaagtagccaggactacaggcgcccgccaccacacccagctaatttttgtgtatttttagtagagattgggtttcaccatattggccaagctggtctcaaacccctgacctcaggtgatctgcctgcctcagcctcccaaagtgctgggattacaggcatgagccatggctcccagcctcttcttttttattaaaaaaaataataatttgtttttgcttaatttatttcaccagtcatatcacaaagacatgtgttgttttaggccactgagtttggtataatttgttatgcagcagtagctgactgatacaataggtgttcctggattatcttcagaaacctgataataatatgtacactaactagggctgtatcagggtgcatggcagggtttttgaaggcattttaaagaggtttagttcctgtcctcaggagctgctgcctagtggggcagacagaccatgaatatccatcatggaaggcagaacacataagtacatggacgaaagcagttccagaggctggtgggttggattcatttggcctgatgtatcatggagtcctcccaaaagaggtgatcatctgcctgagctttgccagacctgttgggctgagagaagccagacaaggctcagatgggtggagggtcagggtgggttggaaagga

SEQ ID NO: 95088 - DNA, 325446 bp, Homo sapiens
  misc_feature (1)...(325446): n = A,T,C or G
atttttaattatatttacataaagatgagtgattatttaactcattttaaaattccattctaattttaaacatgcattctccttagatagttataaaggaaaagagcagtaggtgatcaattactcagggtagattttcaattagtaaattatctgtgttctttgtttctattttcccttctattaactgcctaattttagacatttggctgcttattagaatttcctccaaaatgataaggtagcttaaaacactccattaatacttagaaaccttggtagatttcatgcaaaagagcatcacatttatagatcaaggaagtttctacgctgtatataaattttgccctggaatccttctgtcacatatataaaaagtagcagtttgggtgctattataacacttacaggtaagtaaaactaactttaaaatgtagaggtgttgaaatataacaaagaaataggctatacttatattttcctttctatcaacaaccttcatagtttttctcaataatacactctagcttaaaaatgcaaatcatccttaatttctaacattttagactggcctgtacatcagtagctgctgtaaacctgaactatttgctcatgaagtcaataagagctcagcctttgactgtttatcagcaatttattgggcaggcactgcattttaagtggcagcattaaaaaaaaaaaaggcagatgatacatctaaaaatgcaaggtttctgcattttttccctgactatatgtgaaataataagtattaataaggtccatgttggcaaaatgtttacttttttaaatcttaagttaatcccctattgttgttaattggcacagttggagactatgtcataaatcgtgatgtgagctatgacatcttagtcactcatatttaggtatctcctaatttctcagcttacatattactgaaatgcagctttacattgctttatccctaagcctaccagaaaactgctaaggattgtagacatttcatcaggtaatcaatacaaagttttcaaaactttgacaattacctatttctctaatagatgagtaatttaagtattgatataggcccgcactgctaacaatgttttggtcaatgacaaaccacatataccacagtggtcccatatgattataatatggtactttgtgccctttctatgtttagatacacaaagatttaccattgtgttacagttgcctagagtatttaatacagtaacatgctgtacacgtttgtagcctaggggcaataggctataccatataaccgaggtgtgtagtaggtcacacatctggtttgtgtcagtatactctgtgatgttcacatgatgaaatcacctgatgacgcattacccaatctcaggtattctttcatagcaacagtaaacagactaagacaagcttccaccatgtgccaggcactattctggtaattggagatacacagcaaacaagacagctattcagagtccttgttcacatggcactaacaccctagtgaacagagataaatgataagtgagaaaacaaataaacgaacaagaccattttgtatagtgataagtgctataaatacaatgaaacagggtagtatgatagtgaaagaaaaagtgtgtatgtgtacatggggtgtccaaaaatttttgataagattcttggaaaaaaagcctttctaaaataaagtaacatttgaggttagacttgatggagcacaaggggccagctatgtgaaaatctctggataccaaggccctgaacagggtttcccatttcacatgtatgaagaacacaaaggtggcctgaggtattagagatgcattctccattcctttagacactagccaagtgaatgtattaaaatttaaattaaaataaaatacaaaagttcagctcctcagtgacaccaaccatggttcaagtattcaatggccacatgtggttagtggcaaccatgttggacagcagagggtctatttgtcattgaagaaagttctaataaatagtacttcaccagtgaagtaggagcattggaataggaggagaggtcagagagaattacttggaaagatcatgaaggtccttgtaggactgtcatgaggactgtgatgaggactgcattctgcaagtacgatgggtagcctttgggtagttttaaataggggagggacataattcaatttatatttttaaagtgttactctgctatatagaaaatgaattataagtagggcaagatcagttagttactgcacttgtcctggccaaggaagatgatgggtctttggcaggttattataagagggacagtgaaaagtaaatggatttagaatatattttagagacaggatcaagtggatttcctaatcgactaaaagtaaracaagataaacaaaggaaagaatcaagacccgttccctcttctggggcctgagcaactaggtagatggttatgttctttactgggatgtaacaagattgagaaaatatagtttgggtgggtaggggataggtaggaagggaattgtaagttaagaattttgttttggataccttatgttttaggtacctattagatataaatatataataatcagataggtagcagagaatgattgaacccatactacggaacgtaaacttactgaattttacaatagaatcccctgacgcttaactatatttaataaagctcaaatgtgaagggttagatccttttcccaaaaaactgtaaaaacatgtttgctagatttgactaagtggaagatttatcaagtaaaacttaaatttttatttctgttgtccatgctctactatttttctgcacgtacaacattttccttattctttggctgtgttgtcactttcttgaactaggactcaccactatctgtagaaaagaggcagtgtttatatgtgattgctccctatccagtttatgtattgcagcttatttcatttaatatactctgttaaaggtacattattagtcgcttctttcagttagtatagccctgcaggtttctgcatctctctaacattagcattttgttgtctttgttcacttgcctctgggttctggatggtatggggagaaaaatctaccttctttccttttgatgggacaaataactttttgattatgatttgttaaagaaacctggatgccaggacattgcctccttattttattgaagagttccaggatgttattaacacatggatttagaatattcttgttttgctgccattagcaaatgccattttttcctgttacaacttttaaaaaacatctgcttcccataccttaagtgttcagtttttatgataatattatattaaattttctaaagaactgagataattgtgggggtaggggacagataaaattgaaatattctaaaatttcccttactatgcttttctttttaaccttgatatatgccagatttttggtttattattttaatatgttatttttgatgccaacagatatgaatgattttccaatcaaggtttttcactccgatgtgtcccaggtaggatctggcatatgaatcatatgtctaaaaaggaaactcatgaaagtatgtgtgcgtgctagggggctcatttgtctttggcaaagacattgctgctcctgtttccttaattattaaacagatggtgcccactgccattgactagctgcccaactcatactcctgtgtggtagcacaattctggacatctgacagagagaagctatacctttatagtttctcatatctacttatgtcataatattaatatctgccttctactagaacaggctgcttcccatgaagctgtttaaaacttaagtcatcttctccccctgtccccataaattaattttatctcaaggatctccttttggctttttttattgcttcatgtctacatacaaaatacagtggcatattgaatcaattatctaaatgctctaggctgtaaatacactttaacctggaatgtcaagataattaagacaaaattggattattaagattattattagtgagggcaaatgacatctaagatagccatgttaaaagtggagtatcatattaaaaagacaactagatcccagggaacatcaatagagtttaagtccattgaacagatactgaattctttttcataatctgccaaaaaaaggttagcttgaaaattttcttttagtttctcaaatatcacactgctgcagtacacgaacctttactcattaataactaaggtcctgatttttttcatatgctttgctcgaagatgtagtattttgcagccatagacagtcttctaagatctctcctagtgttaacccacctatcctcacctctcccttgagatttttctttattttttgatgaactatctgggcttttaaactttgttaaccttttttgaggatacggtcacttaatctcaatgtaattttactttccacagtcaaaaactattgtgtaatactcatgcactggatttaaatgactgctgcctctccttcctttctttttatactattgtggtctaggtaaggctgattcttccatcatttgaaccaacaggccaggcttgggttctcataaagcagaccttccagcaggagcgaccaaaggatgacactgtcacctgaaattggactgctgttgtacctgacttgggaacatctttgaatcagacagtagaagtggctgtcattttcagggacagtagaaagtatgttggctctcatctgccaagtaggcaaacacaatcttttttttttttttttccttccaacgttctagggagctcagcctcagggctagccgcagccccccacaccccggggctgcggtgggctgcgcggtggatcagcctcagcagcccctgctccagcctgtagggtgaaccggccgctttcccagcaaaggagcaatcgagctgagggtagcgcctcctccgcaggagggggcgggagctcggctgagaaagctttcctagggagttgccttaaagaaagaaagcggaattgtcgatcactccagttgccagttttatacaattttaagcagtcgtcgccactcgtttcccctttgcaaaactgcaaatcaccaccaaccttgcatcaaatagaagtggggagggaaaaaaaaagcaaatctccttctcccttctcaccctccctttcttctcaccctcccttcctctcttactcgctccttctccctccctcccttctgcggctgccgctagtctctcggtctggctctctctccgacgggacttagcaacttcttatttctcagccccttgtccatttttttttttccatcctttgccatgaattggattgacagaggcgggggaggctttgctttctgccccagggaatggcgattcgcgtcctggggccgtgccggggagaatcggcagaggagaaagaaagagtgatagaaaaagagctgcaggaaggaggagaagggagacctccatctgccgcgggcccggcgcgctgcagcgcagcgcagcgccgagctgcgcctcggaatggcccggagcccgccctgcgcccccggctcctccagcgtcagcggctcctgcgcgcgggatgcattgggcaatttttgaaatcctgaagtaggaagagaccccggaggatataagtcgggggtgggggtggagcagagaatctgtgaaagatattcaaagagagaaaaggggaatcctgatcgtttctgcccgtgcttgttttcaacttgagcgtgctagcctttaacttgaagaagtctcattggagcatctagcattctccaggagttattcgaaagctgaaactttcagtggattgtgggcctggggagaagaaggattccgagggtggaattgggaagabcgtgcgtgcgtktgtgtgtgtgtgtgtgygcgcgcgcgcgtgggtcggggcgggggcgtcggggggccactgggaattcagtgaagagggcaccctataccatggcagtgcccggcgacgctgcacgagtcaggracaagcccgtccacagtggggtgagtcaagcccccacggcgggccgggactgccaccatcgtgcggaccccgcatcgccgcgggactcgggctgccgtggctgctggggagacctggtgctgcagccgctccggagctctcggaaactttcctcygcgctgtgcgcgggctccctgtcctttctgctggcgctgctggtgaggctggtccgcggggaggtcggctgtgacctggagcagtgtaaggaggcggcggcggcggaggaggaggaagcagccccgggagcagaagggggcgtcttcccggggcctcggggaggtgctcccgggggcggtgcgcggctcagcccctggctgcagccctcggcgctgctcttcagtctcctgtgtgccttcttctggatgggcttgtacctcctgcgcgccggggtgcgcctgcctctggctgtcgcgctgctggccgcctgctgcgggggggaagcgctcgtccagattgggctgggcgtcggggaggatcacttactctcactccccgccgcgggggtggtgctcagctgcttggccgccgcgacatggctggtgctgaggctgaggctgggcgtcctcatgatcgccttgactagcgckgtcaggaccgtgtccctcatttccttagagaggttcaaggtcgcctggagaccttacctggcgtacctggccggcgtgctggggatcctcttggccaggtacgtggaacaaatcttgccgcagtccgcggaggcggctccaagggagcatttggggtcccagctgattgctgggaccaaggaagatatcccggtgtttaagaggaggaggcggtccagctccgtcgtgtccgccgagatgtccggctgcagcagcaagtcccatcggaggacctccctgccctgtataccgagggaacaggtaagcactggcaactcctctctcggctcttggaaacttgaaacacttggcaaccggcgcagagtggagagaatccgagcgctgggaactaaagggaagatagcctagaaaactggtctaacttcagaattaagaaactagcaggttttttttttgttttttttgtttttttttttttgtttttttgccctctctttcacacagtagttttataacctgaacgactgaaacacaattaacaaaactagatggcatgtgtagggtcttccacagctgggccaactttttagatctgctacacctggtgtatggcttgcctactcttttcagtactcttacgctttccttccttagcagaaattttagaattaagtttagattttagcaatgagtgatttttttaacacatagattttactagatttctactttttaaaaagtaaaatctttttaatgaaatgatattaaacatttatgaaaaccagtaaaaagattctagagcaaagcaagctgtgcttgaaggtgaggaattgatacacattttctggttttgcagtaagttttatttggagagactgcagctgatggtgcccaatttgtttttaaatataatttaggggcatacattattacatgctagtgtgttttgtatcacaaacttcaacttggggaataatatgtctgaactttggaattgttcaaaattgtcaactgcgttttagtgtcaactaaaaacaaaagagttctctttagtatgtgcatacttaagtggatatttataaattcaaatggatttatgcagattttacaggaaatactaattcgggaggccatttctaagattgctggagatgtatatcttcccacaacgtgggaggaggaggaacctgggattataaagttgtaaataaaactttagtcacttttggggatgagtctccttattatcattaagtgatttaaaactatagaacagttgctataaagggcataaaggaacaaatcccaattttaaatgcatactgtgtctaaaaaagcataccgaagggtatgcctccctagttgaagcagatttgttcacctctctatttgaagtggatttgacacttgatggggaggaggagctggttggatacagcaagtggaaatttacatttttccctttaaattaatgcctacctgtggtactattaggacaactttagggagcaagagaatatcctaagataaagtaagctttttctttttaggttattctgtggataatcatttgggtatttctaagaaatagcagtcaccatatggtgtgggtggctagttggtttctgaaatggagttgattacacagatctatggctgtttgacattattgagcagagtagatgacagcatcatagtctgtttattttaaagcaaatgtagttatttgctttttgtttcgataaaacaaatgtttcttgtctttaagcttactctaagagtggaggggaaaacaggccactgactgatagttttggtaaaaatttggaaattgttaaaatggagtaagttatctatttgagggtaaactaaccattttaatttcttttcacagttatgggagagaatgtcttaaatgaaaacaccaccgctttaagtatgttcagaatacactattcattaacttatagggaaataggatgttactattgcaaaattcacaaccataatttctaaggaaaatctgggatttaatcacaacttgattccaaattgatatcatttaccctgtggaattattttttaaaattttatattaacatttataagttaagaaattaagggtggatagaagataagaaggtggttaggtaaattaaccagcagcattcatttaacccacacatttttattgggtttctctggtttaaattgataaatggagaatttgaattatctacgaagttatcaaaataagcattgcatatttaatgttttgctgattaatgctgttggaaaatgcataatcgcaatctatttctgtaattttctttggtcactattttttttaaagactgtgttaatgaagattattctaaagtgggaaactttgtcttatgcttgatggaaacacaagaatacatttagcagaaattgagatacttgaagttttaatgagggcatgggtgagtgtgtgcgtgtcactgaagactggtttttatatatgacccattaaaagttgttgctgagcataattgtggggagtgggtggaaactaacacagtgtactatcttataagataggacagtatctcatatacgttagccttactgtgtgaaaagttcaggagctacccacagtaaatggcttatctgttttatcataaggaaacaaacttctgattaagggtgcaaagtgtaccactgtcatttgcatactttgtgaagtcaaacatcaaaataattataaaataagtatataacactcccctgaatgtcatctgctttttttctgaaggaatgtctactttcaactcaagacaatactcataggcaacaagtgaattttaaatagtcatttaagaacttaaacgcacagtctgtcagagtcctcttgagaatttatttgcactttgctcattgtgaggcttaccagtgagagaatttcatcattttcttctctgtatgaatggcagtggctggttactgatgaactatccctcttcagtgaccctcagttccaaaagtgcaaagagaatatatgataaaaattctcataagagaaaccaattgacagatacatttttctctctccctccctttttttctttcaagaactgtaagtctgtagcactggtgtctgtgaatgcaagtggaaatatctttattctcaggaaaaaacaaagtttatagttctttaaagtttaaagaactataaagtttgtttagcttttagtttagtcctgacaacccagtgtccgcaatactgaggctgattttgtagatgagtgtgtcaaactactyttttggctgccagtgttaagaaggcaagtgtctgttaaggtgtgtgtatcttttctaagtggactttcgcatcccagagcagatatgtctctctcaaagtaccactgtgccctcggcccgaaacatgggaatatacagaggtacctagactttcttggagtattagatattatgcatgattaatatgttatttttcaatgtaaaattttaattttgcaatttttttgttattgcaaattgtatttgaaggggtgtctctccattctctttataaataaagaactataattggctgctcattcttctctaattactgagaycaccttacacattcacttttgaaagatttcaaaccaatgcaattttattttagttacytgttaaggaaaattttatatttttacctgtggtttcaggtaaatacaaaggcatatgactgtctccrttaatgcatttgtaccacttaatgacarcatttttttgggatggatacaacatcatccattttgatcttagttgtcgaaagaagagtcaagtttttcaccactgatgtgagaaagacacttttaggagagaaagcaaacaacagcaaagcaaaaataggagaaatgggtatggtgtttgatggtaggcactggatgggaggcattgttattctttgacaaaaaacttgcttatttcttctcaaaatgtagaatacattgtttaaattcctaaatgcctgtcaatgtaacatattgttcaaattgagtaagtttcagaaataatcacggacttttaattaaattgtagcttctacatttcagtagtgttactcagtttatggtgattcaaagagcaatcttgattacttatgacttggtgacagaattaaaattaattaatgtcaatttctgaaaatactgaaaagggaaaacaagatttccttatcccttgggaaaggtgaaggaaaagaattttttgtgtgtcggggggacaaaaattgtaattttactttgtgaatacagatatttaaagcatactgaaaaagttttttaagtgacataaatagtcagtgaatctatataaatttacagaggctggaaggagtgaaaacagtaattttactctttctgtattgagtcgaaagtgtaaaaagttaaaactgtagaactgaaagaaatgctgtgtatgctgggctgtcatgttaattaaataaacaaccagaacagtgactctgtgtatgaaatacattttgaaaagccttgggggagggggtgcaggcaggcaagggtgagtgacactggcatgaaaaaacattcattctatctgcagtgacatttgtgtgaatttgttgtagtctattagaaaattcagatctgagaaataatctcttcagagcgctagttgaataaaggctttaccaaattgaattttacttctattttaagcaagttctcattctgtcaaggtaggatgtttataaacctcaaaattagaagtatgcctatatattttaagatttttccattaatatggtttgtgtcagtcagcccagtagagtcaatgttgacttcattgaaaacgtgtgttattttatctatcaaaagaaagagtttattttgggattaggataggagttgtgtttttgagaaagagttattgttgtgagttatactgtcctggatgtgtgaagataatcaatgcaactattgtatcatgcctttgcattgggcgatggggaaatgtctyatgctcccggaagtgatgcataaccctacaggtttatggtgaattgtttacttagctgccatatgtctcctcttcagtggagtcttcctgctccatttctgtgtggtgtttatatcttcttaaaaaaaccctcaaattgagattaaaaaatattatgcttatattctgcattcatgtgtttaatgaacctctgtgaaataattctgaagaccctcagaaagtccagtctcctattcttgcacctaaagatgtgttccattaatgttcaaatgaagataattcctttatatagaaacttgaatccttttggtaattacctatatatactttcatgataggtagtattttttattaaaggagattttttgttgytgtttgtttttttagtaaggctactatggaattgttttaactttgaactgagaatgtatgtttgtgctgttattgatataaaatatacagatttgatcactgagaaaaaagtctaacagatgtgcctgagttgtagtttagaggaagatgtgttgtatracaatcgtaaaaaatattagttgaccatacctgttcattgtgaatgtataccactgttttaaaagaagatgctacccatagctaatgttacccattatccataaaggcctttgatcaatcaacctaccaggtctcaaatcaacacattttatctgtgcattagtccttgtgctaaaaatcaaaaataatatacagatagatgtgacacagcatttgtctctgcaaagtttagagcctagtgagattaaygagaagtgaacataagaaaaagggaagtcacagtgaaatatcttagataatggagaaatgcatataataacttggagcaggtttttaacctggctccaggactcattcatctcctctctgaaattgtatgcagaacttcatttgttcattcttaggagcaaaaagtcttagtgtcataggttttcagaaggtcctcaacacatagatggttaaacataaatggcttagattttaagcaactttacattttgaagacatggagaatgtttttgaaaatggaaattactttggtgtacctttacagtctgctctgaaacaaaggtaaaataatatttcatttaggacatgttacacttcaaaatagtacactgattgattgtatttatgtcgagttagtttatgactgtaaatagctggttgcactgatattttaaatgcttaattctgaaaaggctgtagttagtagactacaattagtctgattttagagagaaggaaactgagagttagctatatgtgtgaagatagcccaaggcaagatggcttttgtccatttcctctttgacttgactgtgctactgaggaaacagtaggaaaggagtcaggctgctaactttaaccctgggtatcatttktaatttttcccatggagccaactctaaattctcattcagcattagaagactgaataatcagattgagtgtcagatgtgtaaataacacaaaacttgttaataccaggtagcctctggaatgaattattcttgactttgtcacgtaaatgaatatcagttgcactgaaaagtctaactttgtggagtcttatcaaacaaaagtatttagcagtggcttaaatattgaatatttttattttagattttcaatatgtttatttttgtatgttcaggatttccaaattcaaggcaaagcataatctgcagattggtaaggcatttcttcattagcaaaaacagctggtaatttttttcacctgttattttgcagtgtttccttagaatttcattaaaatataagtaaatagggtawaatatcagaggaggtcatgaagaacattaccatttcgaagatggaaagctatttgagagaagtcacaaactaagcaatgtctgtgtttttgatttgattagagctgtcatttgttatttaggaatctgtgaatgattattaaagctttcaagtatagccagtcctgctaacataataataayattacattaagggcactcatgttctttcctcctgagaagatgactggttacagggggcacatattgtttgctgaagtgtgtgtatgtgcatgtgcatgtgtgtacctgtatgtgcatttatgatttgtgtgtgtgcatgtgtgattttcccctggcagaaaattgctttggttgtrtcaatttagtgaagaaacagtgtcacccagtggctttgatgaaaacagtcctataaacattatagataagcactgtccagtagaaatacaacacaagccatacatttgattttacattttctagaggccatacacacccaagaaacagatgaaatgaattataataatatgctttatttaacccagcatagcatgtcaacatgtaatcggtgtaaaaaaaatgaaatattttgcattctgtttttttgtgagtctaaatatcttgtgtgtgttttacacttaaagcacatttcagtttggcctagccccatttcaagtattaaatagacacaggtggctaatggctaccatattggacagtgcagctctatatttttaaagatttgtaatatttgagatactaatgtcacctcttcagttataatgaaaagtctttgtagatttaataacaatatacagtctttaaaattatatgtgtaatcttgatagctcatttttgtaccactctaatagttgccaagtctatttgcccttttttcttcatttctcattattgcatttattttaaaatatgattattttcatcggagggggagatttagcagagttccttaataaaagacctttatattaacctgatttataacacagtatcaatatttccagttaattatgaatttgcctttaggagtttggtatgtaacagggattgcttatggatacactgtaaacacaacacatgttcatgatgattagtctataattgggttatctaatgtctctttagaaatgaaagtgcttatgtttgtaggtcattatctttgtaacttaggaaactaaaagtcacaagcctgctcctagctttaatggatgaaaattgtaacagtgtctgtaaagggctaacttttcactactgtttatwtaaataccactttcatggaaacacaatgaaaatggttcattctgtgtatagagcagattggagattttgatagtgtggaatttttaaagtaggaatttagattaggtgagttttggagccattttctgagttcactcyggtttgcaatttcaaactgatttcagatgaaaaagtctggaaatgtttaatgtcatgtcctctccatcacctttccttatactctatgaattcgttaacaatagccgtaattccaattctacatcaagaaataaagagaaaattatatatggcattttactttatatatagatatatagattaacttttaaaaatacatttattatgtgtataacgtttatatctgtgtgtgatgcttttagtgattgggacagggtatattacttatttttacactgcagattaatatagacagattttatatcatagatacatagattttcacttactagaaattctaaaaagatcaaaaggcaatagaatcatggtatacaaagaagcacatttggacaaaatgaaataatgtggatgctggctcgcttctggtaaaagctgacttaatttagagttcttgaagaagctagctgaagaatgaaaygtcatygtaacacacatctgtttcttgaaagagtttatacttgaatgtaactagtcactgttagctctggctaattttgaagttgatttaaattaatatagaggttgttctggtacttttytttttggtcagtctttttctgttctccatctctatctacatgcacattttctttcatttcattttctttttacctaatagagtcttctccctccgaatgtgtttaaaattttaaggaatgccattctgtctctcccagtaccttgttagaatattgaaataattttatgcaagaatcttgtggttttggtttaataggattttagtaaaaattttccatcttgtgaagtaagtttaaataactgaatatttatgctatgtctgtggcaagtgtttcctcctctccaggtataaaccacttaaagagacctaatggaagtttgaagtcatagagatattattcagtgggtaatgtttaattctgtggcaacagttatacagctatgtggaatcagcatccttagcccatttttaagctagcatgaacacaaataaatgaaatagtttttatttttatcgtattttagagatccacttcagaaatgctctttagtgagcagtgtttgtcctcgtgatatgaaacatccccttgtttgggagttattatttcagggtccagcctcagcagcagtctctcaggaagtttggaagggagagagcctgctgaactgcttatgctgtattgagaatttgctttctagtctcaggaactaaggaagtcagattcagattaagacaatttttattataaaaggaatcaaatttttgtagcttccttttctcagccataagcatttcatttagaaaattctggcccagtgtcttgcttattgtaagtgctggctggatggtaggaaaaatggatgaaaaagaaataaaagacttttaacctgaaatatttatctccccattctcctgaggttgaggtagtgactaagttgatttaaggaaatttctatgggaagaagagaagaaataagactatcaacaaagctatacattttcagttttaatatggtgtttacatttttgttacttaaatattttcttgcatatgttacataaggggttgcatttgcctgtgcccttactggtaggaaatcccatgttcagcatgagtcctagataattatttttagctcactctcaactgaaaataaccaaagctaccaccaagatcattgtagtgtaaacctttgaaaaatttctgaaatttgggttcatattttagaaaaataaaatgtcaagtgtttttcacattcaactaataaattgagagagaacaaactctgactttattttcttccattccatcccacagggctctgacaggtgctcttcagctatcaccttttttatactctagtagtctgcattcttgttagaggttcttactgaatagctgtattttctgaaaagtctaatgtaaagcaaatgttatctccttagcttttaattgtgatcaattacaaaacaaagtttgagatggttgcttccagagatgacattgtgaaattgactttttaaaaatgtcatccaactgccgtgctrgttccatcatgtggaatgatctagaaatttggtagcataattgcagaatcaagttgaactgaaaaatcagaagcttatagggttttattgcagtgataaatttagcttttcagtcatttttctttggtccacctactttttaatagaacttgacttgtgaaaatcaaaaaatttaagtcaaataagaatgttttgttgttgcagttttaatacttagagaagatacagtattgttatatcctctcactgaaatcagagacatatcttttgagtatgttaggcagatgatcatgacattagatgaactaggaatacaatatttaggaaaaaagtgatttcgaaccttayggtgtcaagtttctttttatctgtacatgtcaagtgttctcacaggcagactttttagagagattgctatcactgacaacttccagagtttgagagttttttgaatatactacttaaaaaaatctccatatggttttcatttgaaaaaayatattacaaactgagacattcactataaattaaattgaaataatcaaaatataattaagctatttgtgagtttacattttgyaaaacattttagaagcaaaatcatttaactttgtttgcattttgagacaaggagctaactgtgtgtatcatcttgagtagtgtctgtttttattcctagggaytgttttccctataattggagttgttttttgctaggtaagtaggatccaaataacagcatagttattaaggcagtagcctcgttttgtccacttctcgtcattcctttttacttaaataacaattagatttgctcatcttaacccctttacagagctacagctagagcttttaagtgtttttggtggaacttccttaagcaattaactagtcctaataaaaagtgtgagaattagattgggaatgttggatacatatataactaaacaccgattaagtaagttatctaaaaaataaagtggcattcagatatgaaaaccaccataaaaatgagtgccaaaaactaatggtagtatttttgcttgtgcacaaagaagactagatcaaaatcaaatgaataattcctcagttttcaaaaaatattttatggtcttttgagggcataatattagtgcatgtaaaaactagaacsctttatgatttgaaaagaggagaagatgctragagagacactcttggaagctgggcaggaaatccagccatgcattgcctcaaggtctgtcattagatcaaaagcactcaggggacgatggtctgtgtaagaggtcctaatgctattcacgaactctcctgacattcattagtttccaagacattgattcttattctttaactttttagcacatttatcattttcacttatacatgtatgctaatagcaatcttatgtgaacttttacctcttatatgaccagaattgattaaaaatgtyggcaagtaagtttgttatttaatatctctgaactttctctattttacattgaatatttgctacattgtaagcattacagtatgactagattcttctttttttctaacttctcccctgttgatrattattcttatataactataatgccatgttaatcaaactattgtttatgaattataacagtaaatgcccctggttaatagattaatcaacctgccttagatgcttttgaagtctgtgaggacattgcttaatttcacctacatataattacatatcatttgacactctctaaatcgagctgtttattgtagttctcaaaatttagtgtgaataaaaattatttgggaaaactattaaaatgcagacgtttaaatactagattatagatcctgtaaccttccagatactctgatttagttaagtgtagagtgggatcctgaaatctgtggttttaaggaacacctcagttgcttctgttgagaatcacaggactataaacttgtgtctactgaaactgtacaggaagttctgacttttgcaatccaattcaacaaacagtttaaaagtgcttggctcagacaagaagggtcagtatcatggggaaaaactatacacacgcactatagtttatgaacctatgacattcataaatgtttcactttgatttcatttctttgaagttcaaaaaaacttcattgatgatacctcaaagaagttttcttaaccaccctggatatcaatttcctcatctgtaaaataggaataggaatatcagcttcactacctatctcatatggctgttttaaaggctaaatcaaaataaattgctatacaaatgttaaatagaaagaatatatgcactctctagactgtcacagaccaaagcttgtaatatataccagtttcttaaactttcaaaactttagtgaccctgtctgtaccataagaataatataactgatttcttaacgttgcaaaggttaaattaatgtaataatggacagaggttcttgttaaacactgtgcccagctgaacatgaataatacatattcttgcccattagggccaggtcattgaaggttataatctaaatttcagaaagcactatgtaaaacaatgcaaacaaatttgcatttgattacaaaaactcacaagtcttacaaaatatgaaaatttaatggaagttaattaaaacagtattagggagttaaaktgtaagcaaagccactgccaaatgaggcatcctaggagccagataaggcaacagtagaaggagagagatctgatagggacttcagatgcttcgggtgcttcattgaaaaaggcttaagagagatatttaaaaaaattggtggagtctttgaatgtcttcgtaaaaatgatgcttttgagggtcggttgtgtagtgtgtcctataaccccacgtacagaaacttgatttgtgctttaaatttgacttgtactctagctgccattataacctatattttgtcttgaaaaacaaaattattttcaaaaattttagtttcatttttcatggtaaaatatcagtcattcccaacccttttctcattatataccagtggtgccattattctcaaatgacagggactttctgcttattaactgtataatacagctaagccctggctcagctgtggccctcartggaaggtagtgagtgtttattttatcacataaaaatattcctcaggatgctgtctctttttaccagcttccacagggctttactctaggccttaaccctcagaccactcttcttccagatttttccacttattgaatgatctttcagtctagtctgaggtagttattttggtttggccctaggagcagcaggagtcctgtggagtctcagtctactcctrttggtttcagtttataaattctgcctggagtggtcatctctttcctaacttggttacagacagtccatggatttccacttttgtgayagaagatggaaaaaggtgaggaggaggggacagcagatcacataggccatgaggggtcactgcaagactcgttctgaggcagatgggataccatcaaagggttttgagcaaagaaaggatgttaccagccttatgttgaatagggtgtctcatattctctgtgttgagtgagagtaggtgttacgatgtaagaaggaaaccaattaagattgttgcaataatccagagatggttgggagttggaccaaaatgataatgtcaggggcagattttaaatatatattgaaatcagtactgccaagttgggtattgatgggctggtatttcctttgaggacagacagagagttcctttaatgttttctcttattttagagaccaaataataaaggaatatttatctttatttcttgctttaaaaatatctgattgggttgacatttttttttttttttctctaattttatcttctgcctacaccttccggaagatatacaaactggagacctgacattcgggaaagtcatgaaatctgcttacatggaaataaattctaatcaagcatctcaaactcttcaaaagttttttagtttgttaggatactataacgttttgtgtaataaaagttggttttgaaattttattttgatataaatgtctttatattttaaaatctgttttaacaagatgaaattttaatmaatttgtgtcattcacatgctcttccttttaaagagatgtatttgcagctgatactctacctatcttttttaaaaattttaatttaatttaattttaaaattccagaatacatgtgcaggatgtgcaggtttgctatgtaggtaaacatatactatggtgctttgctgcatctatcaacctgtcacctaagtattaaacccagcaagcattaactatttatcctgctttttttcaccctgtcgccccacccgacagactccagcatgttgttcccctccccatgtccatgtgttatcattgttcagctcccacttataagtgaaaacatgtggtgtttgsttttctgtttctgcattagtttgctaagaataatggcttccagctccatccgtgtccctgcaaaggagacgacctcattcctctttatggctgcatagtattccatggtgtatatgtaccacattttctttatctagtctatcgttgatgggcatttgagttgattccatgtctttgctattgtgaatagtactgctgtgaacataaacatgcaygtatttttataatagaatgactcacattcctttgggtgtattcccagtaatgggattgctgagtaaaatggtattactggttctaggtctttgaggaatcaccacactgtcttccacaatggttgagccaatttacattcccaccaccagtgtaaacgcgttgttatttctccacagcctcaccagcacctgttgtttcttgactttttagtaaatgcaaatcaaaaccacaatgagataccatctcacaccagttagaatggcgnnnnnnnnnnnnnnnnnnnnnnnnnnnnnnnnnnnnnnnnnnnnnnnnnnnnnnnnnnnnnnnnnnnnnnnnnnnnnnnnnnnnnnnnnnnnnnnnnnnnnnnnnnnnnnnnnnnnnnnnnnnnnnnnnnnnnnnnnnnnnnnnnnnnnnnnnnnnnnnnnnnnnnnnnnnnnnnnnnnnnnnnnnnnnnnnnnnnnnnnnnnnnnnnnnnnnnnnnnnnnnnnnnnnnnnnnnnnnnnnnnnnnnnnnnnnnnnnnnnnnnnnnnnnnnnnnnnnnnnnnnnnnnnnnnnnnnnnnnnnnnnnnnnnnnnnnnnnnnnnnnnnnnnnnnnnnnnnnnnnnnnnnnnnnnnnnnnnnnnnnnnnnnnnnnnnnnnnnnnnnnnnnnnnnnnnnnnnnnnnnnnnnnnnnnnnnnnnnnnnnnnnnnnnnnnnnnnnnnnnnnnnnnnnnnnnnnnctcactcataggtgggaattgaacaataagaacacttggacacaggaaggggaacatcacacatcggggcctgttgtggggtggggggagtggggaggtatagcattaggagatatacctaatgtaaatgacgagttaatgggtgcagcacaccaacatggcacatgtatacatatggaacaaagctgcacgttgtgtacaagtaccctagaacttaaagtataatacaaagtattatattaattattaattatattaattattaatatataatatataaaatatatatataaatatatawaaaatatatatataaatatatataaaatatatataaatatatataaatatatataaaatatatataaatatataaawatatatawatatatatataaatatatataaatatatataaatatatataaatatatatataaatatatataaatatataaaaatatatataaatatataaaaatatatataaatatataaaaaataaaaatataaatataaatatattaattatattaatatattatattatattatagtataktatagtataataaaaaaatactaaaaaaaaattgccattctgactggcatgtgatggtatctcaatgtggttttggtttgcatttctctaatgatcggtgatgttgagctttttttcatgtttgttggccacataaatgtcttcttttgagaaatgtctgtttatggcctttgtccactttttaatggggttggggttgtttgtttttttcttttttcttctttctttttttctggtagagttggggtttcaccatgttggccagactggtctccgtctcctgacstcaagtgatccacctgccttggcctcccamaatgtgggattataagtgagagccactgcgcctggcctttttcttgtaaatttaaattccttgtagattctggatattagacctttgtcagatgaatagattgcaaaaattttctcccattctataggttgtttgttcactctgatgattgttttgctatggagaagctctttaattagatccatttctcaatttttgcttttgttgcaattgcttttgatgtttttgtcatgaaatctttgcccatgcctatgtcctaaatgatattgtccagattgtcttctagggtttttatagtttttggctttgcatttaagtctttaatccatcttgagttaatttttgtataagttataagaaaggggtccagtttcaattttctgggtatggctagccagttcttccaggaccatgtgttaaatagggaatcctttgcccattgcttgtttttgtcaggtttgttgaagatcagatggttgtagatgtgcagtcatatttctgagttctgtattggttccattggtctatgtgtctgtttttgtaccagtaccatgctgatttggttactgtggccttgtagtatagtttgaaatcaggtagcacaatgcctgctgctttgttctttttgcttaggattgtcttggctgtgtgggctcttttttttggtttcatatgaattttaaagtagctttttctaattttgtgaagaatgtcaatggtagtttaatgggaatagctttgaatctataaattactttgggcagtatggccagtttcacaatattgattctccctatctatgagcatagaatgtttttccatttgtttgtgtcctctctcattccttggatgctctaaatatcttaagctctagtatagcaaaaacatgagactttcaaagaaaattcaaggctttctctattagtctttgaatagtctgacaaatcccaattccatcaaagacatattgccaatacatcccaggtctttttatagaggaaatacttctattttgtatccatattaactcagactatctgttgacatacagagcacttcagtgataggtgctatataaatatttaaattaggatagctgattgctctgtaagttaggagtttgctaattctacattgtggttaatttctgattatgaaacattktttacatactgcttgggaacaacaaaagataagatattttaaaatgtgtgaaatgaagagtttttaaatcacatgggaaaatacttttgatgagtggaaagtgaaatcatgaaacacaattgaggataggccaaattcacagcagaaaggaaacttgtcaagatgttcattcttgtttatgtgggagaataatgggttatttttacgtacttttatatcttttttctgtattttgtaagttttcaaccctccacacgtattttacaatcagcaaaacaaagctttataaagaaatgtattcctttgacattgttcctttggatatgttcacagaatatttattagggccattgccttagtggtcgtttgggttggagacatggaaattgcacctccaggtgcttttaggaatggtaatgtgtgatattcagtactatataaaacacccttggaagtaaaatccttttgcattcctaatttttgtcccagatggctggacaggcttaaaatttcttataaaattggagatcctagtggtacatgatcctccaaggtagatccctgaaattttagatcggcctacagacaatttttgtaactttacctgaaggtagcgctttatgaaaatatatacatccacgtgtatgcacatatataccgaaacatgtttcagtttttaccaaggctttttggtgtctttttgttttagacgtggcaacaaaactctaccacgtcaactgatacattgagaagaacatgaaaacaaatgttgttctactaaggagagaaaattccttataaaacatgtaggaggagagtattgagactacctcactgattaccaggctaataaggttacaaataaagatcaggttcataatgatttttgtttaaagtaatgagcatgttttctaaaaatgagtaatttctatgttttgttgttttcgtgtatctgagttacatacactgtatataatattgattaacttcagtttcatttcccaggattttgttgagtattccctgcatttcctgcgtaagactaaggaactttatacatttccatttgttgttgcttgtttgaataaatgaatagagaaagaaaacaatgtgtacataatattttttaaaatggtgccacatctaggattattaaaatgctttttcatttgaagagctgtacaattttgcagaaataaatttgagaatattaaaacagtttctataactactgagaaaaatagagagtgtgctctcacttaaccaagaaaaaaatctttctagaagaaaatatgatagaatcagagaatgtaaacagaaaaatcacttttackcaatcattccacccagtttttacggttctgtcgaaggagagttagcagaatagtactagctgattatgcttgcgatggttaaggtgacagagactggtagccatttcctttctctctctctctttctgtgtgtgtgaggaggaaagggggcaatcagtactgaagttagcatttgggtagaatccagatctcagccttgcaggtcagagatgcaatttttccataaaactagaggttatccactgaggaggcacactaataatacaactatatctcatcaatcagaatgtcaggttattaatggacacaggaatttaactgtaaggaagatcagagtgccagtacttactagtcagtgcttcttgtttttagtgggaaagtcacctttagcatggttggctcctagactgtagctgaggatctctggcttgtgggaattctccttggaaaacttacactgtttgagttttttattctagaacgtttgaagagtgcccacaacatcccagaaaatgtggggattgctgggggaagattcagaaatgaaccatccttgcaccctccctgagtaaagatactacagtaacaaatgattatactgccaagggataaatactttgaaaaacagaaagtcatgagaactttgccctccagaaaggtcatagctaaatttaatgctcaaatactgtcaccctcttaacatggatttctggtaaagttctgtcttcctgtcttttctgacttttccttttgatttatgttttacattctcacgtgtttatgttagtagtaggctgactataatcaatttcagtacaatataaagaatgtatctaaaatagaaaaaaaaaacccagtgtattcgtaaaagaatatttctatatatttcccctatgggcataaggcccagaggatatgaggtagggaaggattaagatgtgttgaagagctggacatcaggtgtggagtgcatactgggttgtggaaaagacaggtggaaaagacatgtgaaaaagacacatagccctgcttttgtgmtgaggagtagaggtgggatgctgggaaattttaagaggtaagataagggggatgtggggccggtgtggagaggggagcaggatgaagacttgagtgttttaagattaggttgaggaatttgatattttatgtgtaccaaacattatattttttaaccaaagagtgatgtgaacagattaaacatrattattctagcagtggattaggtggggacccaaatggacacaaggaggcrtttaagagggtattgtgaaagtcctgggtagagacattgaagatttattaagatagtagtggtgggcaggaaaggtgatttaagaaaaaaaaaaaaaaaactgcagttgggaggattagcttgtgattgatagtggaaggtgttaacaaagggcatgaacgccacttaaaactgtgaacctgagaaactagaaagatagtggcgctggtcactgagaaaaaaagcatcagatcagtttttgtttattttagtttcggggtgaaggagggaagatgatgtgtttggtttggacatattcagtgtatgttacttttgcaacctcatgtgaccctgtctccttgaagctgctcaattttcttagttcacaaaaaaatattttaataccacaaccacgttagttcaccgtattttcctgattagtatgtacatgctttttagaactggagcttcttgtgcccagcctatcactacaaacacagaaatgttgtaggctttggacatttcaatttgtgcaaagactatcaccctatttaagattagatgttaagcacggtcctaaatcttacagggcagatgactttttactcttggtgctgaatcctaccgatgaaagatattactgagtcagtacagacttcagcttctgtgtaaccctctaacgatccccagggcaatatactgttgtaacctttgatcacacttaaaaagtacatgggcaaggttcttatccttgagcagatgagtgcttttcatatgactagttaaaaacttactttatcagtagagacaatctaggctgtcgagagaagttaaccttgtaaaattatcaggttgagttccactttgatgtttttcttgggttattctagatgcttactatagtttgtcttttgtacagttaatatatgtgtgtataaattaggctatattcaatgatgctagctagcatcatcgtgtgtgtgtatgtatacatatatataacatatatattctcatatatatatatatatatatayacacacacatacatgcattatacatatatatatatatacaattccggaccgttgactctggatcaagggtccggaagtgcaatccactgttgattctttgctcacatagttaagtttcccacattgtacaatcttcaatgctttcactactcttctagacttgtgtttatatatcatagtaaatttttggaggacttttttttttccgtttatgtatgtgttacttttcctgaaaaacatcagtgctkttgtatcacaggattggagggaaattaaaggtagagctcaatttatgaaatgcctaacaagtgatcattgttaagcttttgcctaatcactaccataatagggaactaagtccccttccatgccattttgttctycccttttcccctcctctctgtttagatatggtcttttgaaattgaggagtccagaatctggtacaacagatatggtatgactggaacaaagcgaagggtggctgtcacctcttttgtagaacaataatttgtgaaccttttttacaatatacacttgcctaagcatcaaccctcaacctacagagcatcaacgtgtgggtgagcaggaagggggacgtgtaattttgtcgtatgcctacttacgaaccactagtctagttaatgagacccttaacacatactaggactgcacttgcttttttttgtcagcataataatctatagatgtatattttgtttgtatcagctaaagctttgaagaccttcacatgagttaatactacactccattcatctgtcctgtgcctttggtactttagaccttctgtttttgtttggtcccaatgcaaataggaagataactaaggtttctgctttgttaaataacttctggtgatttatgtatagctagaacagtgaaaactgggaggcaaaaacactacataaatattaaaacaatttgacaaatttataactatcactgtaggtctaaaatgtgtaggtctaaaatgtacctggactagatgtggtaacacatgcctttagtccaagatactgaagtggctggggtgggaggattgtttgagcccagtagctcaagatcagcctgggcaacatagtgagatcctgtctcataaataaataaataaataaataaatacataaataaataaataaataaataaaatctagctggacattatggaaaacagtatggaggttcctcaaaaaactaaaaatagaactcccatgtgatccagcagtcctactgctgagtatgtactcaaaggaaatcagtatgctcccatgtttattgtagcactgttcacaatagctaagatacagaattaacttcagtgtctatcaacagatgaatagatgcagaacatgtggtatataaacacaatggaatactattcagccttaaaaagaatgtaatactgtcatttgcagcaacatggctagaactggaggtcattatgttagggaaaataaaccaggcacagacaagtacttcaagttctcacttatatgtgggagcctaaaaagtggatcttgtgtaggtagaaagtagaatggtgattgccagaggctgggaagggaagaggggaggaaggaatgaagacatttggttaatggatacaaacatacaattagatggaaggaatacattctagtatttgatagcacagcagagaaattatagttaacagtaatttattttatatttcaaaatagctagagtggaagaattgtaatgttcctttattagtctgttttcacgctgcctataaagacatacctgaaactgagcaatttacaaaagaaagaggtttaattggacttacagttccacatggctggggaagcctcacaatcatggcagaaggcaagggggaccaagtcacatcttacatagatggcggcaagcaaagacagagagccaagagaaaaagtttctccttataaaaccatcagatctcatgagacttattcactaccacaagaacagaatgggggaaactgctgccatcattcagttacctcccaccagttccctcccagaactatgggaattatgggaggtacaattcaagataagatttgggtggggacacagccaaactatatcagtctccaacacaaagaaagataaatgtttaaggtgatgtatcatccagttacctgatttgattattacacattgtatacatatatccaaacgttacatataccccaaactatgtacaactctgatgtatcaattaaaawgtaaagaaaaacaaaacagaaaaaaagctggaaaaggaaggcttgagatttgatgcactaaattctgtgtacttttggaaataatattaacataaggtggcaccgttaatggtgaaatgaacttttcatcctaggtgcaccctttgagatggcaggcacaatggctctttgtcttctacaagggtgattatcacatggtaggctttttcaaacactaacctgccttcgattctgatatgttctctctagggcacctcccaacctcctgaatcaatgctgtagtgagccacagttactgatgtgtgtgtcacatccatcaggtatgttgacgtgagagaaaaagtttacaaatcgcagctctataaacttgaacctagaagggcatgaacctaatttgtggaccacgcaagcatttactttcctgtacaaagttcctgtaaggagaaatttaaataaatatagtgtagaggaagggcctttccaggagtttctttaacatcagtgaaatattcttgcaagaggcaatatttgactcagtattttcattggtcatttagattttacttttgactttaattactggtattctagccttcaatggtwgactgtttcatgtttctccagaaagttaggtttcatttttattttctatagtttatgagtccatgcttgtaacttatagggaaatcataaaaacagaacagagtgtagttagaacactgaacttctaaaaggatatccctgccttagagatggtatataatactttttcatgagttgggataaataagaaacctctttgtggcactttgggcaagaaaagaagttttgctgtagttaacattgtgatgaaatggactattaatctgaagagttgcacctggaattttttaactaatgtagttaacaattaatttgtataataaatagctatcagagaagcattataatgatatcagatgctacatattcttctcaaagtactaaattttacaattataatctccacagaagaaaatacgattttaaactgcaaataaaacatgcaagaacttgaatcttttattctgcttctacttgctgtgacttttcatgtttttaagtagggtattgcattgattgtcaactgggccaaattttgcccctgcctgaagatattatttagtttttaggacttgaagagtgctactggtttgacatctgctaggtaaagttcaggagtgttggtaaacatcctacagttcagaggacaactccctataagaaagaattatctgactcaaaatgtcagtaatgctaaggttgagatatatcttagattattgtgcatttattttaatccatactccatatggaaagaaggatggaatcaatagaaattgaatttttcctaattatgaacatagtgatagcaggatctgttgatggagggattcaaatacagcgcagtgattaagatgctggatttgttatcagggttgagttctggtttccactctagccacttgttagccatgtggtcttggtaaaatgattagtctctctgagacagaatgtcatttataaaatgtggataataaattctaccttacaggtttgcttggatgaataaaattgcttgcagcctggaaagtattacatgttcaataaattgtagctactgttctatttagaatataaactgatattggtagcatagtatttatatggttatacagagagtgagatggtagaaatattaacagaaatgaatttcttgaatataaatatttctttacagtttaatgaagagctgtagtatttacacatagtattatatatgtatactatgtatacacatagtatatatatacatagtataatatgtatactatgtgtacacatagtataatatgtatactatgtgtacacatagtatatatatacatagtattatatatgtatactatgtatacacatagtatatatatagtattatatatgtatactatatatacacatagtattatatatgtatactacatataactagaatagaatcattatatatatatatatatctctagcaaagcacagtaacataggtatataactagaaaataatatttgacaatttggggagacctatagagatgcaaccttcaagacagtaaactaacgttaaaaatgccraattattaacagaggttatcaatgaggttcgttaaaaagaaaaaatattttcccttttaaaattttttattcttttattattttattttagsgacaggatattgctgtgtcactgtcactcaggctgaagtgcagtggcatgatcatagctcactgtaaccttgaacacttacgctcaagtgaccctctggccttggcatcccaaarcactgggattacaaacatgagccactgcacttggcctattcttccatattgtcatattgcttaattttgttttcaaaaaacatacattccttttgtaatttagaaaacaagtattataaatgaaaaaaaccctcatagctccccaatataaatggtgaaaaatataatcgttaaaacattcctcttctaatttataaggttacccytttttgctggtttatctctattagttggttttcctcttcagtcacctttctaaaagtggataagctgtaggacccattaacattttactggcatgataaagctggtcatgttgatgcctttatcgcctaagctggcatgtagtgctattgtgaagccagtacagtttcgtctgggtggtgagtagaggaaaagtgcagaagaatttagaacttgaatgtctaaagccagaactctatccttgaccaagtcttccctaataatttattaaaaacttcaatagaaatatagaaagcatattatttaaacttccagttgacaaaaactggaagacatacatactagcttagatgattgagtatcagtttcaaaatatgcatagagttgaataacgagtaaacattaaattttaaaaatatttaatttaaaaatatttaaaaggagaaaaggtaaatttctataaatttagatttaggaataattttataatttcatgatgagagaagctggaccattatctaatgcccgttacctaagggttagtttgccacagttcattgaactgtctcttagactagattttgaaagcaaacttttcagaatcctttgctatgtttgtagcattgtgaccagttctgcttgctgtattttaagaggagtattgatcactatgaagtggtcagaaagcctggaattagtcaaatccctgctctgccatgtattaactctgtggctttaggtaaattgtaatgcttaatctctcaaagcttaggttttcttatatagaaaattttttttaagctaccccagaaaaatgttttggggattgactgagattataaagatgctaataataataacttaataaaccttgtatgttgcttactctaagccaagctaaattctaaaaatgtatgtttgtaagtacatttaattctcattagtactctgaggttgatactgttgttctcattttacagctgaagacacaggcacagtgagcctgtctctatatatgtctctctatatgtctttatatatgtstctatatattctagtaaatcatagttaaaaatttttgtgcatatgagtgctagacatggtatcatgtgtttatatacctttgttaatttttgccagaagaaggaagttgggcttatctcaataaacgttttgagcccttttggtacctataaagatacatataaagaattatacttatggtatatctcaaaactgagtttgtttcctataacccatactaaaaacaatttatcaagttaatatagtaatatrttgtgtaagtatacatgtataatatagtaagatgtatatgataatatatgttcaagttaatatagcataattagcaaaatcataattgggttcaaataatattattgactgatactttaaaatatttcccaactattatgctgttccatttacttttaaaaaaaatagagatattcttttcaatttagagtgtaaaataattgcctcctccgtatatattttaaagatggcctataaactagattcattaattcaaaattactaaaataggcaactcagtaacaaagagaatcagctcattttcttagatgctaacaaaactaattatacaaattctgacaaagtggacattgcaaatgaatgaaaataaaaggattgttcacgatcttattgattaaataaggagaggctttgactgagtagatgatttattgaatacttaattgaacattaattgattatttaaatcattttaaagaatcagtagtattcatccctccatgagaatgacaggttttttttttttgttttttttttcgggagtactggcaatcaccatctgattcagtctaacgttttytggctggggcaggaactctgaactttatttccaaatgagtaataatgataaacaatcctagaggaaagtgggaaaatgcctgatggcttattggcgggaaaaagaagggtgtgtgagaggaggaattattcagttatcactggtctggagaagaaagagcatggcccatttgcaaaaatgattcttagttcacttttttttttttttttgcctttagtgatattatgggtaatagcgataaatttttattttctcaatttatatatatcagatttctcactctgtgtcatcaattaattcattcaaatccatttccaaaactttaatctcgttaaccttgccaatactgttttgaaaatctgtcttgagtttctgagttataaacagcctcatattttcataaatatgaaagaaagccatcaaaaaaactgcacttatttttttagccttggtttctctgtattctgtaaaatgatatagcctaataagagagctttactctagtggccttcattatagcccatgtgcaggatgattctgaaatatataaattaaatgaatggaaacagrcatgytgacaagtttgtttagcaccaacgattggatatgctattcttaaaccaaaacttttgtttactcattcattcctagaatttcagtattttaagaagtctcagtgctacaggatttcctgtatttttttaaaatgtggtaacatatacataaaatttaccatgttaaccatttttaaatatacagttcagtgacattaagtacatttacattgttgggcaactgaaaccacagtccacttccggaactttttcatcttcccaaactgatactctatgcacatttaaacaacaacttcccattccctcttcctcccagcccctggtaactaccattccactttctgtctccatgaatttaactattcttgatatcttatatgagtggattcatgatgtttgtccttttatgactggcttagtttacttggcataatgtcttcagagttcatccatgtygtagcacatgtcagaatttccttcctttttaaggctgaataatattccattatatacgtatgccatattttgtttatccatttattattgatggatacttgggttgctttcactttttgtttattgtacatatgttgctatgaatatgtgtgtatgaataggaagatttttatattgtttaaaagtggcaataatgtgaactttttgtataacatcaccaagttgacaaaggagctgcagcaaatgtgggtggttttactgcattttaaaaactagaacaccttcttaaactgatcctaatcaatcagctcctcatggaaagattagagcttacaggaagagaatgaaaggcatacatgaaacacatttagcacattaagacttaaattttcatttaaaactgaaattttattgcttggcttgtctttacatacaggattcagactattaaaaagctgatagaaaaagcttaaaatactattattttagtaatcctagagaagcaaagaagcctcttaacaaataacaaaaatgtgggcataaataacacatttatttcaagataacttaatgcttttttattaggctctttttggaactaatgaaactattatccaaggaggagataaattaaatttccacctacaagatcagtatagcaatattctgaattcaaaattctgttgttaaggatggtgtaaccatatatgacaagscttttacaaactcctttttgaacattgctttaagcaatcatttstgtatttgtattaattttcaatctaatcattccaaatgaggcaaagttttgtgtaccagtgattgaattagaagaaagaacaagttattttgtatagtctaaaagctttgtaagaatcctctgcttgcagtgtttgcacagttctccattagccctgtcgtgttttcttcttctttgagacatccattagtagatactttaacactaatccgttttctgtcccaaatacataggagtccaggagccagggatgcaggtgtcattttaccttctagtagtctatttttgtgttctggtgcatgtccgactgagctctatttttaaaagtacggagctgcttgctacctgaagccagagagatactgaagaatgaaagacctcgagagtcctgctgtctaaaggagtagcacagccagacactgatgagggtggaggtagtagctgagtcttttgttataaaagctcatgttgactcgttaacatkggttttttttttttttttttkttttttktttttttttttttttgagatggagtctcgatctgtcgcccaggctggagtgcagtggcgctatcacggctcactgcaagctccacctccctggttcacaccattctcctgcctcagcctcccaggtagctgggactacaggcgcccgccactgcgcccgtgaccgcacccggctaagtttttgtatttttagtggagacgaggtttcactgtgttagccaagatggtctcgatctcctgacctcgtgatccgcccgcctcggcctcccaaattgctgggattataggcgtgagccactgcgcccggtcaacattgttaatattttaatacacatttttgtttattttgtttgttcttttctctattgctaattttcgcccagtatgctaagcattttagagagatcatgaatcctcattttgcttccctttgtttgctcttttcccttttgctaattttctcctagtatgctaagcattttagagatatcacagattctcttaagattagaggtatgtattattatttatttttaaggcaaaagggattaagtaatttacccaaagtctcactgtttatcagatgcagaggctgggtttgggtccgggtctgtcttgtgctgatggcttcctgtttctgttacactagatggccaaaacatcactggaacttacaggatataactttcttcaaagtggtaatcattatacccagtccttctttccgttttctactctcactgtcctagtttatggccgtatcacttygtagttggatgggctgttgcagtaacttctcaactggtctccctaccctcatgccatctgaatattaatttattcattgaactaccacactacatcttcttgatgtacagctctaatcaggcagcagttttgttgaatgttaatatttaatcatgtaaatcctttgataaaaagtagtttgtagttgttttttgcctttcaaatgaaataaatacctccttgtttgggattcaggaccctctctaatctacccttcttaacattcagtcatttyaaactgctactgccttcatcacatcaattttctagtgactttgaagcgtgccttttctctctcaagacagagataggtagatctcttgaggtcctacttctgtctaccacattattgccctctgcccctaattctcatctctctatcctgatctccaaccagcttaggttgaaattttacccatcttctacctgcttcacgatgtgttttctgatcatccccgttggaagctctttctccttcctctgagtctccatagcgctgtatctattgctgtcttacggcacttacattctccgtcttggattgtgaatagttttataagtgagggtgagttccttgaggatgatcaatgtataattgagcccacctctcctgcgccccacattatttattgcagtgccatgtagatgcttaacaaatgtttttgaggcaatgagatatcatcataatttgaatgcaggtagtgcttggaaatttagataatatcttaagtatatgttatctcattaaatctgataacaatagtgtggaatttggtgattatccccagttgatgaatggtacttaggaattcacagacataggttcagtatgtatctgtggagmtttgtggatagttgtgctgctggggaagttgttaggtagaagtccaagttaaacagtagggagctaacaagacctcctgggaaattggatcctggatttcttttttttaattctttttttgagagagagtctcactctgctgtgcagtggcacgaccttggctcactgcagcctccgcctcccgggtcaagcaattctcctggctcagcctcccaagtaggtgggattacaggtgtgtgccaccacgccctgctaatttttgtatttttagtacagatgtggttttgctatgttggccagactggtctcgaactcctggcctcaggtgatccacctgccttggcctcccaaaatgctgagattatagttgtgagccaccacgcctggcctggatcctggatttctgaaccaaggttgtgatttggactcaccctcaggaaatcaaatataaaatcatttactaagtcccacaccatcagtttttcatcttacggtgggccctagatgttggaatttttgtttttaagtgtaacaactttgaaaaatattatattgaatgtatagaagacaactatgaatataaatttattggtattataaacactaaaaaattttgagcaaataatttacagacttctttttgtaaaatataaattcagtgttttctttatatctgcagtattgtgaaaaataaatttttttctaatgcctggctgaaaaataggtctgtatcctagttgtacaagaataacccttcagaggcacaggattatgttgctataatcctaagtgagctgtaagagttaaatgcattataatgggtctgcttgggtaccagtaaagattatatttaaaactcaaaataggaaacagaaaagtcttgtgtatgaatgagaaacatttgatgaaaggaagttacataagaatagagaaataatatataactcctactcattatgtaataatgtctcatttttctttctccttaaggaatgccatcacatgaatttttattgttgctgttacattggtaaccaaatttcattttcttactgtgtgggtgattttaattgaattttttcttgcttgctcaaggtctatctttatcaacttgaattattgcaaaatgcaacagttctataacatcttcagagacaattaaaatgtttggagatattttcctgatgctgaatggctcaacttttcatgctttatactagtatgtgtgcctctttaaatgttaattctctcccttacagttagctgtccggtgtggtgtggttagcaggtatctttgtttctgttttgaagaagaattgcgactttgcagggagagcacttaaccatgcttgtcaggttaatagtcttatttattcacagttgtagtcagtgggcactagatggaggcctgagggtgacagtatatttttcctgtgtaggacagctcttaggatttgtgagcaccattccatttaccatctagcagccttttctccattacaataaaatttacaattgtattatgaatgaagagcttgttggaattgcttcttaaagagaatgaagtcatttaacatcagaatgtgcaaaatgacaattccgtgatgaaaaaggagaatttagaagtatgacaacctacattttgtcttttttataaggcctccccaaaatttttatttcagggctatttcaaatctgagcttcaaataaaaacaaacaaaatgttaggactatcaattctaataaatttttatttaggtttttctggcacagttagaaatttagttatatataatacatatgtagatacatatatatatgtatcttgagagacgttagattagacatggtaggcactcaatttctgaaaattttcaaactctataatttagttactctttagatttctacttcaacttcctaatgaattattttctttcaaaggctcttcctggaatttttctgtttttggcaggtatgtttgcatatctcaagtgasacaatttggccaggtttctgaaaaagaatactttaaaagaaaaatgtaggttggctcttaagtgttttaatgttatttgagataaactaaaatagagcataatcatatggtatattaataggaatatgtgctgatttcttaagccccattcaaattttacgatagtttttgtttcttttaataaatttgtttggtttataactttatctcaggggggatatattattattttttcctcatttcttgagtgaaattttagcagaagtgacttaattataatcttggagatgcatgttgcttacaactaattgggtcctggacttaataaaatcacttatgtagaaagccatatactgtaggttaaaaaagaaaagggacaactttggtaattttcaagttaaaaatagaatataagtttcatgaggtcaggaaccacatctcttaattttttctttattctgagttcaacctaattattatatgcatgacagatactctttaaacttttttattgatttattggttacaaaataaatatattgaatggtactggcaattctagctttgtttcccacagatctggctttatctaagaatatttctctaatggaaatagcagttcctaaaagtttaattaactctttgacctcagaccaccttatttatatatgtctaaattatttcctttccaggcatgattcatattccttgagctattggccacgtgccagggaccattgccattccacacatgtgtaggttacagagttttttttttttttttttttttgagcaggaactagcatgtaaatcctttcttcaaaatatgtatttatctactggctgatacctgacaaaggagtgataatggttccctactgcttgccgactcaaggacagagttttctgctacctttatttcttcccccaaaatttattttgacagactgctttattgagagagagaatgaatataggatcagtgtttctgtacaaacatttgaatttggtgtgaaggagggataagcgtcagaggaaatggaaaaggggaaatagaaaagaggaagtatggtccatgctgcccaaaccgctgcttcttattaatccttctctgtcccctcagcagtttttctctatctttgctgtgtggattttgtccattctattatgggtgtctacctccagggataacccaggcctcttatggtttctttgtgcacacgctctccttactccagtcgctacctcctgttttctttgagcctgccagattccttcccaccttcatcctcttccagtccttgggatgacctaaattctcttctgtgcttactagaatcctgttcatctttcattccccatttccaggcccctctctttcacaaagctttctgaatctatacagcttcattctcattcacctgagctgctcacacctggcacctcacagtttagcatttccttactctgttgtgtggtcttcatttcctgacctcatcatagacatcccattgttttcttttttgtttggctttattgagatataattgaaaataaaatcgtatatattcacagaatacaatgtgatgatttgatatacatatacattgtgaaataatgaccacaatcaaactaacacatcgatcatagttacctgtgtgtggtggagttagggggtggtggcgaccatacttaaagtctgctctcttagcaaactttgagtaaatgatacagtatttttaactatattgtaaattagatccccagaacatgtgaacttactcatcttgtaactgaaagtttctacctttggaccaacatctccctattccctccaccttccagcgcttgacaatcaccattctaccctctgtttttatgagttcaactttcttagattccacatgtaagtgagatcatgtggtatggcttatttcacttagcatgatatcctacaggttcacccatgttgtgcaaatrgtaggattttctcctttttatggctgaatartatttcattgtgtatgcacacacatacatatacacacatcacatgttctttatccatttatatattgttgaacacttaggttgtttcaatgtcttggctttgtaaatagtgctgcaataaacatgggagggcagatatctctgtgacatgctgtttttatttcctttgcatgtatacccataaatgagattgctggatcttagggcagttctgtttttaagtttttgaggaatctcagtgttgtttttcgtaatcagtttactaaattacattcccactaacagcatgtaagggttcccgtttttccacacccttgccaacacttgttatctttttggtagtatccatcctaataggtgtgagggaatatctcattatgatttttatttgcattccccggatgattactgaagttgagcaccttttcatgtacttgttggccatttgtatgtcttctttaaaaatagttctttgcccattaaatcaagttacttattttttgctgttgtataagttcccgatatattttggatattaatctcttattgggtgtatgatgtgcagttattttctcctattctgtaggttgcattttcatttcattgatcacttcctttgttgtggagaagccttttagtttgatggagtcctactggtttacttttgcttttgttgcctatgctttcggtgtcatacccataaaatcattgccaatacgaacgtctttttctgtgttttattagaggagtcttatggcttcaggtcttacatttaagtctttagttcattttgagctaattttgtgtatggttaagataacagtcaatattatttttgtgtgtatggatatacagttttccaagcaccatttattaaagacatattctttccccattgtttattctgtgcccttgttaaggattaggtgaccgcatgtgcataggtttatttctgggctctctgttctgttctattggtctatgtgatagacatcctgtcttatgctgcttttctgccttattggaggcaaaagtcactggtatactatacagtttgggatcagcatagatgttgattacaggctctgtgatctagagaaagttacttagcatctctgtgccttttcwttctctatttaatrgggacaatatttcctatctccaaatgttattacttaatcttgagataatttgcttacagcatctgtcaaagtgccaaacatatagcaggtacacaatataattttgttttcctcataaatacatggttaggttcagcatggttattcatgaaaaacttyttttaaaaaattgarcaactgaataaattctaattgaatggctgaattatttgaaaggcaaaaaaggcaggcaataaagttagtctgaagtatcttcatgtaggtattcttggtgtagaagtgtagtaactctaaatctagcaaaacaagctttattcccatatactgtagctgattaccaagttcccagagggaggttggtggtgctttggggtccagtttattagattggattagatggggtagatgcaagaagatataccagcattcccaattccttccaatacaaagattttgtggcttattaaatttttaagtgattatggagtacttaattttagctttttataaacttataaatttttttaaaaactatttccagttggctttcatatgtttttcatagtatagatatagcatattacatatctatattgactacatgaagaaaagcaactagtgtgtaaaaattaatttttttgtttttgttgaatgtcattgtttcagacttctcttgtactgaagtgtagtaaaatgtattttctatttttatttatttatttattttgagactaaatgttgctctgtcccccaggctgtagtgcagtgacttgatcttggctcactgcaacctccgtctgcctcctgggttgaagcaattctgcctctgcatcctaagtagctgggactacaggtgcgcgccaccacgcccagctaatttttgtatttttagtagagatggggtttcaccttattggtcaggctggtctcgaactcctgaccttgtgatccacccgcttcagcccccgaaagtgttgggattacaggcgtgagccaccatgcctggccaatgtgttttctttcaaataaaactttattagaaaaatcatgtattataactaatattttagaaatctataagagtatggctgaagttaaaaatttaaacaagtgttattagtcttcctacataaaatattggtatggaatctgcataccttaaataaaagcttgtagttacaaaactttatattcttagtaatattgtatactctagtttaatttamatggctgtttggctctgttaatgatagaaaacccttcattattaaggacagcacttcacagaaaattgactgaagctaactttaacttgcagatggcgttcattaaagagtttcttttcataagggtcatttttcatttttatttcaaagattaaatggatttatacataattatttcaacatgacatctgttctcattttttcctttcagagctttcttcccaaatattccatgtttgtattttgtaaaccatacaaacaagttttaaaggaaaatatataatcctgagtgattacataatttattgccgttctctatcttatgcttttaattttatttaatgcatgtcttaagtttttcaacagacttttctaaatgccatgataatattaagctctktgacaacattaattatgtgtacatatattatttcgattgcacagtttttgagtgcaatgatggatccattgagaatgaggattctggaaagctctaaaagagtggcttgtgtatttttccttcttcctttttacccgctttcctctctccctccctttcttctggaaatgggaatttttttaatgaaatttcatgcaaattcaatgaatgaatggtaaaacaaatctgatccaaactattgacagaagtggaggcaggcacagaactccagcctcttcatcatctcctcrtttcctcctgaattccttttcatgtagtttcttggacagatgcatctggaatctgaaagtaatatttaatagagtattcacattcttaatagttgttatatttgtaagtcagcgacacaggttgaagccacaagcaatatttagtcttgaataggttttactttttaaaattctatttgagcttttttcttttttattaattgtggtcatttctacaactctttctagaaaactgtatttctcagatttgaatatatttgttattattagctctcttatttaaagatgaactaagtttcttaaggacaaaaaagaaaataatttttacctacaatttgatactatgtagagagaacattttctttcagaaatgatcaaaattgtgaaatctttgatagatggaagaaagtagttgtctttgcttgtaatgaatactttcaaaataaagtcgctgaataaaaatagtgatcttaygaaatattatagttggatatcatcagagaggtgatattataaatcttctaccccagatartgattttttaatagtctttctgttrcaaatgtttagtcactactgaaatacattatatgaaagagagctcaccacaaatcaaaccaatacaaaggagtattacaaggaaaaaggctttgaatccaagtgcacattggagcaagctgctattcttttacagattarctatttgttattgcgcattcagcaaattccttagcttttggtcttctgtctactaaaggaaaatttaaattccagctctgcaagtttgttgagtaataatataaatggattatctcatagacaaatgttttaaaataaaatattgctrtaggatacttgctatattgaaccaaaaactgccttgtaactttgactcctttgtcctagtgtttattttctatcctacatgtctgttaggattcccaagtcttgctgtccccaggctaaagctattcattgaattcaactgtccattgtctgacctcattttcatattccttaaacattgctcttccctgggatgcactagttaaatcttattgtggtattgggctrtccttttttgtagccatcctcagggaagccacacttgtttggcatgaccctgttgtcttggctgcactcaattgtacgtccccaagctgagcagtgagattctgattcaggcattcagtattgggaccaagggagagttaagttagtcttttccaacatgcaaaagctgtagggcttgaagcagagaaagtcaattcacagagaaaatgaaacataatttctgttctttctgctagtgtggggagaggaagagggatctcagttacttcaggactttcatgattcttactctacttcttcctgaagctacaccgtgatcctgccctttgttctagaaataaccacctccgtcagctacctagagttagtttctgatactgcagttactatttttcatcaaaagatgatgtttgttttgttgttgttgttgttttgggtgagaaccattaagatgtgtcctgtgatatcatttttacttgtcaattatgtctccataatttttaaaagaygctgttcattataagaccttcccaattcagaggtatcaaaatgtgaaaaaaatactttaatatagcaatctattttgaaaacatctctgttaaaatctagggctcagaattgaacatgaaaactggctcccctcttcccctgaaatggtggcactaaaataaaagccaacatatttcctgttctgtccacagagcccttatctcttgtctccagaaacctatgaaacatttccatttagatgtccccatcaaacgtatttcacaattcatgctcttctgccttgtcaggctggatctccttactttgttttcatagcagcaccatttaccccatcttctaaactagtgaccaaagagagtaatttgggatttttttcttctttcaaattttggcatttatttttaaattaatattttaaatcatggtataatacacataacaaagtttaccatcttggtcatttttaagtgcacattttaatggtaataagttaattcacattgttgtgcaaccatcatcaatatccatcttcagaactctttccattttacaaaactgaaacactgtacccactaagaaattactccccatttcttcctttaccaagcctctggtagccaccattccactttctgtccctawgaatttgactactttaggtaccttttagaagtaaaataggacagtatgtgtctttttttgtgactagcttattttacttggcataatgtattcaaggtttatgtgtattgtagcatgtgtcagagttttgacatttcttgtgttgacattattctgctacttactcttttttttttcctatctttatgctgtcgctgacaactagaaggcctaaggttttattactttgcacctgcgctactgaaataatgtcctaacaggtctctggagattccctccctgcttactgtcataatctgtaatgcrtgaatartctttathtacatggctttcttctgrttgttgacaataggactatcatgaatggacctccatgggtggttagtgcaatgtagaggtccgagataaccccattcttgctaaaaacattacacattttcatctaatgtccccgacgtagtctatcccttcaatgtaatttccgagacctttacaatataggtagaccctttaaaaaattaccgtgtgcttaaatttatattccaccattgttagccaaggrccttcatttcaattttatagtcatttaattttctcagtgtttatatctgtgtcttcttctttttgcctttaattcccctcagccaaaaatttcagcatacttatgatctatccaaatatgtgttctgtgtatagcttatctttttcattaaaacttcactattgtttcagccctgtatagttcacttagttacacgtgtaattttaaacactgttgttgactgtgttgtactggttagaagccayattaactagatttcagtttcttgaaaatttatacattagcaagcatagtgtaaatatgtattaagtgggcaataaatatttgytgtgttagtggcattttaatagtacatgatggaataaatgatagatgtgttgtaaaagcttttattgcatgattgccagtttctacctcattgttgtttctaaatctcccacttttaatttacctgaaagtgctttaatgtgtgaaaatatttaagaaattattagtgttccttttttctcctgagaatcacacggacaactttttttgatttaatctatattttgtctagcattatcccaacattagaagtagttaatgtatccataggcaattgttagatacatatgtaagaaagtgaaaaaccracagacagacaaaacccacctaagtcaataatattggcaataggatttagaatgctgttatggcacatgagatgctccacatcctacctacatggaatatggggtatgtgtaaagaatattgtttagccctattttttcgtttgtttcttttgaactactccgttttccttaactctccttatctttttctgaatgaccttaaactcaaggtagtcrttgagtgggagggatgatttttagccatctttttcctccaactcaggtagataggatttaccagcttggycttaatttcctcctttctgttaacattgaaaaccatcatactaactgtaaaaatcaaatactgtaataagagtgagggagtgcatgttttaaagtctgtmgctatattagctcataccacatatgtggcaagaagcagatactgtacaaatcagttcaataatgaggcattgaaacacaagttacatacygtgctaggaataaaatgataaacagagtaacactatyctgtccttttggatttttatagtttagtaggaatgtattaagtaatgacaagtacatgaatatgattaaagggatgtaaaatactgaatagcaaagggattttactttgtctatgggaccagtgaaaacctttgagaaagtgttctttaaacaaagacttgaaagttgagcaggaggtagccaggcataaaggaacccagagagttttccaagtggagttttccaaaaagcatgtgtgaagacttgcaagcttgtrcaacccaccattttttttgttgttgctgttctgttttgttttgctttaggattttagcagcctgaagccatggatctttgtttctgtctctagttttaagtggaaaagtgggctgaggaaggggcttcactggcccagcaagaaacagaaatttggaacccatgactgtatttctcctgtggacaccccctgcctaggacaagagagagctgtgctgtagaatgctggggaaatggaaaggcagcattggtggaacagagagcatggagaaatcgtcagtgctgggaaattgtgggagctgagcaacaagtgtgagatgagacaggtgggggccaaatgatgcagggcctagctctacttgtcaaggattttgaaatgaaccttaaaggaagctatttaaaggcttagtcaagggcctattatggtgtgatttgtgttttaaagtagccattcacctgcattatggagaatgaaatgaaaggaagccaggagtaaatgtgggaaaaccagcagccaggacagtggaggagagcatctttgaccagtgtgatggtacgggagrgtgaaaatagatggactttagagacgtttagtaatagttttaaactcatgtgctgtaaattcgatttgattttaagaggtgacaggaaggcaggaggcaacaatagctttcaggtttataccttgagtagttctgtgaaaggtgatgatagataacagaatgtgattcctgagatgagaaaaactggccaaagaacagattctggagagacggcaaagaggaattctgtgatattatacattattgtatgttaatatatagtgtaatatttatgtatacgtatatttgattatatgcctataggatacygattttggaatcatccctccacaaatggccaataaggccacggaattagacaaaatatattgggagcttgtagaaaaagaagcactcttgagaatacaagtacttaacaagagagtagargtgaatttagggcagacaaccatagatttcaaatcatatagcaggaaaaagtcttgtacatcatccaatctgatataatcaaaatgaagatgaatgaaatgaaattctgtcagactgtataaatttctctaagtcaygcatagaaagtctcctaagtctaygtttcttgtgtaggttttgaaaaatacaattcagcttcctattgatattttgtctgaattgaattatatattgcgaaggtgtcaaaaatgttttcctatgtttaaatttaacaccctttggtggcagcaaattttcacatctctcttgagtattcaaatttgttaaaatatgaaacacagtgcttggccaaaaacagataatatttgctgaatgaatcaaacgggtttctgagacratcaatyctttaaagatagagactcagttatttgtctttttcttctgagcsaagtacaaatacttacataacaattatattgaattattgttatttttttcttgtagctattttttctcatggtgtaaactgagggcaataattggcatttttcagagcaaaagtttgatgtttaaaaatctaataaatataaaccactattagacctaaaagtatgtcaaacataatacaactctgattataaagtactcattacttttttgatcataaagattaaactttacaggattgctgataaacttaatagcacattttttttttgctttccaaaaaagcttttatttaaagactttcttttttaaccacagaatgtcaagatagttatgttctatttattgctgatttctccctttctatttttttcctttctttttgtatcatgcccatagcagctgtttccctaacccttaccccaacccacaggctttcccacgctccttttttggctctcatttggcatcgatcctgagtttgacagataaaacatgtgtctgaattgtagttacagccaaactacaatctatcagcttttccctcagggtaattatgcttattttaycccaaaacaaggtaattgttttgtgataaagtattcagttcactcggaataagccgttggcctccttttatctacttatttatttatttatttatttatttatattttttattttttttgagacggagtctcactcagcttcccagaccggagtgcagtggcatcgatttcagcttactgcaaccaccagctcactgcaaccaccgtctcctgggttcaagcgattctcccatctcagcctcccaagtagctgggcttataggcacccgccatcatgcccagctaatttttgtattttagtagagacggggtttcaccatgttgrccaggctggtcttgaactcctgacctcaggtgatctgcccgcctcggcctcccagagtgctaggattacaggcgtgagccaccatgcccggctggcctccttttatttaattcctcatccaatgataacatgctgacagatgactcaggttctttggagtcagtgtgaatgaagctcatgggatattagaattggagacagaaacagagaggcagtacaggcttcagtgttagacagaaatgggattcagtccaaacttggacacatactaggttgtgactctggatgtgatattcaatttctatgwgtttccatttcctcatgtgtaaaatgagataactacaagccttttgaaactttgatcctgaagaygtcgttttggtagatctaaaatgaatacatggtggatcccatcactgttttatttagaaatacaaaatcaargttattaattctaagatatgcatccatagctctgcagtatccaaagcacagcattaactttagttgcatgaaaatttcccaagttggtatatggatgtatatgaaattggagtggtcatggaaagcatatgtgactttaaaaaatgaaaattctcactcgaggttatcaacacccttggacttaaagatctgattgtgaattgtctaaattatgtgaaacagacaaactaccgttaggttgttttcctatgcggaatatttgacaactaaacttaaattcacaaatttaagacatgaatggatataacccacctttgtatgtgaatgcatgtgtgtgtatgtgtgtgtgtcactaaatggtcacaatttaaaacaagaccagaattaagcattcaaaaaacatttattaagcagccactatgtgccaggaatagtagaataaataaaatcttctaaagtttrcagttactttaaagtactccaaatttargcatacttcacacgtgctatataaaacataaaacaacttaattcttyattagtgtgtatttcagttgcatctttaggctttttctgaatgccttcattacttcttaaagccctcaagaaattatgaaaactcagaaggcaacctatctgatttcttaaatttaaatttcctggttaatttatttagattatttgmaaattcttctttgcccaggtacctcayacatacatggactatactacttggtcacttttaatttagaaggaacttcctttaggaacagatattttgtatagctgtaaattatttaaattcacatgaaatcactctttatattcaaagtacataaggtgagatgtagtttctttttcttataaatttatcctattaagggaataaattggctattttatttaaaacagaaatagaaattttatgaatgatggttgggaactttaaccaaaatgtacataatgtgcataaatgatgggaaactttgtttctgcaactagaattcatgctataatgtggacattgttagtctataagttaatacgtgtaatttaaccttatccctgtacttgatagatcattagttagcagagttatttatgtgacattatgtggcatgccttaatttttagaaccagtttactttttcaaaaaatacattgcagtacacaaaagtcctgtagaaaaaggtcatttgaagtcttatattagaatgatataatttccttttttgttttactttgagttttaaaaattgatttatttggaaacagattagcaagtccccaattatatctttagatactggtatattaaagaatattttacaaaatcacagtatcaaccatagcctcgagaggtaaaacttatcctattyttaatttccagtggtagcactttrtaaataaaaattatggtgtatgtgccaaaagcctggacttttgtctggcaaaggttgtttaaaacttgaagagacatcaagaaatatgtgagttcatccacccagatctagccagaactgcttttgaatggttctgtggctcatttaggcaattaaagccttgtgattgccctattaaaagtctgaaagtatgcatataacccaccagtgttttacagaggaataataggtaagatttataaaacatctgaaatgaaaaaaatgtaggataataaaagcaggtatttgttgagtacttactgagtgttcgaggcagcgtacttagataatctctgagttttgttatacgtattaaatgagttaatataaagcacatatgtgcctggcacataaatgttatgtatttacagtaacaacaataacagttgtcattgatttaattatacattattatcctaaaaataacagaaaatcaatagatgggagagccgggattggaattscaggctgtctgtctctgaagtccattctccatatcactgagctattctagttttcctrggtagagaatctaggatggccaaaaaatgtccccagagcctccctgtaagctgtcctccacaacagacttctggaatagaaagaagttggcttatgacctcttgtcactgcctagtccttgggtgtgataaagttatttaaactgtttgaactcctccttctgtaagcaggggatatcagtaatatcaatcctaaatgtgtcgggaggattaaatgagataatgcatgcatattgctgctgaacacaaagtctgtcacataataggtactcaataaaggaaggctgtccttgttgctttgaggaatgcagatgactgattccattggttctgagtgctcagtttgtggcctgactgaattatgtgcaccagatytggtggtaggtttttgtgaattgacctcaccccggttgcatcttagcttttctccaccttttaggggatatactttcctcagccgtttcatttaaattgtatttaatgtggttatatttttaaaaggtggtttttaaaggctttcttttttaaccacagaatgtcaagatagttatgttctgtttattgccgatttctctctttctgtttttttcctttctttttgtatcatgcccgtggcaactgtttccctaacccttgattagcttactttctgaaataagagcgtaaaataataaaaataatggttactatattgtgttagttttcccacaacactttttttaatgcttttacattttacataannnnnnnnnnnnnnnnnnnntttttaatgcttttacattttacataactgggaatagtattatatattgattagtgttctatatttttaaattaacagtatgttataacccattttatacattaaaagtctgtagaaattacttctatgcttcttaatattccgtatatgactgtgtcatattttatgtaagtaattctctcttgttaggcttgttgattatctcctggttttgtcagtataaataatactgaagtgcatattttagtaaattcttggttgcacttctgattactgttttcagatatatgtctgtatatggggttatagattaaagaaactaagccctctatgctttaaaataatggttttcaacctcataattaaaattggatgaaatttcttttaaaaatcttagagcagtgatttttaaagtgccctgtgacatctcctttggggttgctattgagaggggagagttacacactgaaggtggcttttcttaaatgccgtttcttttttattttattttttttgcttataccaggtgaaacttattttcttttgaggcaagatcttgctctgtcattgagggtggagtgcagtggtacgatcatagctccctgcaggcttgaactcctaggttcaagtgattcacctgccttagcctccctagtagctgggactacaggtgtgcaccaccatgtcccactgtttttgttttttgtttttttcaattttcttttagagacagggtctctaaaagacgctgtgttttttagttccaaggatgcttttcaaaatatcgagtttcacaaaaaataaagtcaagatatgttgcttcatgtggctaatgtttttgttccattttataataaaatgtaaatattaaattctcatataactcattagagaaccacaaataaatgcatttacttaataaataatttattttaaattatatgacaaccctatgattaaatttaatattgtattttttttttttttttttgagacaaagtctcactctgtcacccaggctggagtgcagtggctgtgatctcggctcactgcaacatctgcctccgaggttcaagtgattcttctgcctcagcctcttgagtagctgggattacagatgtgtgccaccatgcctggctaattcttttatgtttagtagatatggggtttcaccatgttggccaggctagtctcgaactcctgacctcaagtgatccacccaccttggtgaggacacagagccaaaccgtatcgaatatcattaaaaagaaactgtggcatgggatagtttaggaattttttaaaaatcaggtgaagaatattttgttgacttgtcatcataatttttatttacaaagatatggaaaaatatttagatcttggtgcaagtatagaaagaacactattctacctatttccaaagggcttggttatcacatggagccagggcttcggagaagagaggatgtctgtattggagagagactatttggcagtattcttggcaacttggtagggactcgcagaaaactgcagtatgactcttacctataaatccgatctccacgctctaaactcagtcaagtctcgagctcatgattgcttacctccgagttttatgttatttttaacacaagaatggtctgagttcatgcggaggttgactgatgtagggtagaggctaccctggaataagctagcatccgagaggaatgaaactccattggtaatgacaagtagcaggactcttggccaagagttaagttggggcaggaagtttgaactgactgctgaattgggggacattcagggcaattgtacacgtattgcaagggacagggaggctccaggtgacagcttggttacatgattttttttcaagagcaatgtacaggaagcacaggccttactttttattgttgtatggagcagagtcccagaaggaccggctgtggagtgctgaataaaatccctgtgaatgcacaccgrgttctctgaaaatacaagcttctagtcatttctgggttaaggtgtagtccatttcgctttgctatcagattacacataagttattgagcaataaaaggaagaatgtcttgttctttattcatatgttctaaatctggtaggccatcgaactgtactttaataagaataggggaaggacaggtatacgagtgttggacttgttccatattgtcccatttggcagaacaggaccaaaaagtagtctttttctttttttctgatcattagaggtatttaagagcagaaacaaagtttggtggggataaaatagagaacactgaaatggtaaaaccacaataatattgacaaataggatagttatattagacaaaamcatgttccttgagtctggaaattgttagtgtcaagttacactatgtattaaggcaccgtaacatattgtggcactgacttttaggcacatatatttgtatatctttctaatttttttcaaaagtggatttttctgccatttatrtttgccatcgtataaataaaatttttatgttttgatgttcaacagccattttatactaataggagctctaactgtgacaatcaaataaattaatgtttttatacatgtctttatcggacttaaatctgtgttcacaccagataacaactcaagactgtgactatgctattggctatgaggagtgttgctttaattgcagcgaagttaatctgtagaatttaacaattatgttgccatctatcttaagggtttataactctggtatagaataagcaaatagcataaaacacttgtacctgtgtgtactcctcagagttttattggtaataaaaaaaaaaaaaaaaaccacccatgctcacttttgtgcttgggaacagaatctgtttctaacctttgctattaacaggaagtgggagaggtgaaatgagccctggttttgtggccgggccagagcactctgtgttcctgagagtggtattcaggtttcatgtctgtctagcttcttgctcctttgaatagctggcctttgaagtgctaaaaacatagattggtaatgagcaatgtaaagtaaagagtgggaaaatatttggaaaattcaagctctgagaatagcctgtctgggatgatttggctcaggctgtgttgtaactgtgtttttctttcccaggtaaattgtgaagttttatgaatataatagtataaatttcctctataagaataattgaaaaatctcaacttcacttgcgtttttggtagaacgattgctatatttagtttaaaattttagggcggcaggccgggcgcaatggctcacgcctgtaatcctagcactttgggaggccraggygggcggatcackaggtcaggagatcgagaccatcctggctaacatggtgaaactccatctctactaaaaatacaaaaaattagccgggcatggtggcgggcacctgtagtcccagctactcgggaggctgaggggagaatggcgtgaacycgggaagtggagcttgcagtgagccaagatcgcaccactgcactccagcctgggcaacagagcgagactctgtctcaaaaaaaaaaaaatttagggtggcactaactgtcgagtcttttaaaaagataatctatgccttgaagtgccatttttatttttgtaattacaaatgggtatcagaagaatggaatctaatatgaagttgaggtcatatattaaatctaacacctttgaataaaagtagaccttttgttccattgcatgttattattgaggggcccccattataatacaacagtggcctgttttagaaaatattctctatcagaaaaacaccataatttaaaaagacatatttccaccaaagtcacattctaaaatgtatacagaaggacatggaataaccgcatatagacttagtgtatcatgtccccattcttccaagaaaataggcaaattttgttaaacagccccaaaggtaaatatgaatatttttatatttttagaaaggtttgaattttaaaagacaatcttagttctagtatgtttatctcttgccttggaggcagttcttaaaactataaaacttgagttgtgactgtcagaatccaacacttatatgtttatttggaggacataattttaaaatactgacatctttatctaatttgttatattatgttacagtaatagtttaatattgtagtgcatgatattagacttgaaatgctagaaatcactggaatgtatagccaatgaagcctgggttgatttttgatatttttggattatatagtaccaaattataatcccatattctatattcagatctctgaaaaaagtggcctttcattgatcaaaatatatttatataaaacattttaatgaagaatacctatttataaaatatscagaggaaatatatgcagatgtaaaattgagcccaataaatccttgtgttttcataggtatgaaagttacaataaataatggcaattagatattgtgtgtgtcagaaaatcaatttttctcccaaatcaatccctctctttctttctgtttctgtatctctttcacagacacaatgtaaacacctatgcatatgtgctcatatctgttttagttgacttctttcttgagactttaaattctgaaatgttttacactgcatgtacagctaagattaaagtcttctttttaacagtacactttttataatgccttgaacttgtttctctgtggcagaggaaaacagcctcatgcacctggacaaacaaaggtgttccttcaaaaacagactttcagaatcattaattctggtttagaaataattatgaaggttaagtggactctcatgcgtaagattttagagctggtgagtggctaatctgtgctttacttccccttgttttcatccttcttataccaccggtattaccgtgcctcctcttaacagttttgttccctctgtagcaagtgagccagagacagtgcttcagcttcctatagcctcctggtggtatgcagggacagctggctgagatcatatgcacttctacccaaacatatcccaaggtaaggctacaggtagtaaagctgtgaccagaaggtagatttaaaaaaaaattatttaggtcctggaaatatagaaagagcagatagtgccctatagtaataaccaagtgagcaataactagggtgtgagtggagttattgtgtttagtctaagaatgaagaaatagcagtgttcggtgaagtggaatttggtgaggcatatacaaaccagaggtagaaagtagtggatttttgcagtttcatgcataaccgtaagtgcagtattaaaaaaatacatattgcgaaagtaaaacttttaaaggatacttctcagcttgaaattcttaatacattgtagcaatcatattagttcttgctgtaaaataaggtggctataaaataagttagtcaattttgagttgtgagttgaaaaggaaaaagtagtgattaatggagacatgagctaggaaaaagcatttggagagcggataatttacatcagtaggcctctcaacttttctttacctccccactgccctctttcaattacttcccttagatcacaagtttctgttttagtagaaaaatttttctatagatacaaatagatgtaagggagcataaatgaattcctgattactctgtaagctaagaatttaaacatatgttcaggattgtatttttataaaaatttttattgcaaattattaatatagattcacagatgaataaaaaatgatgtggtcctatttatgtaaagcaaaacaaatatttgataggtggtgtagaatgatgtttacacctgnnnnnnnnnnnnnnnnnnnnaaaaatatgcaagtttatatcactcacactgtggagaaaaccagtcagtaacaaactgttaagtcttaacagtgattataatattgaaaagaacaatatcaacagtagaacaaccatatcaagacagtggatcatgaagcaatgactataggattccctcctaaatttcgttcatcgtaacacccacactgtgttctgtctctgtgcacagcacaacaaactcacttcaaagccaaatgaggacttggcatactcaggaaattctagtaatgagatgctcttagttttactgttacagtaygtagcacttcatcttaggcaaatatgacagtctgtggaatcctgtgtcattcatttgaaagaactgacaaaagaacatgtttttagatcaacttgcatttgcaggaacacacatgggttgccaaaaatatccatttagagtgtttaaaagaggcacacgcctggattggcctcggtgaccaataatgtctggtggtaatgcgtgttttttggagtagtctttaattactaaacaaggtggtgacatacataaagccagtgggttttttttccaccggmagatgggtgctaaagaaactgagcgattttatttttttcatcatataatatttctgatggtcttgcctccttcaagtctcaacatgtgtctctttaaagagaatatttcacctttcaaaatgaagtctcctaatgactcacttaaatgtttattgttttcttgccgtaaggaactttgtgacttgtaaatatgaatttatgtatgcatttttgtatgaataaatacatttataaaattgatatttaaaaagagctagcacttaagttaggccagacgtttttctaagcactttacagatgctaattttctaatcctttcaacagccctgaaaagtgactttcatatttaggattgaatataaactcattctaagattgtctataacctatttctgtgttgcttagcatagttctatttaasagaactaagacaaacatatagaaatatgatgatgacaatgatgatattatattactttcccaagtgtctggcactatgcgtatttcaccaagcatttgtagagaagcggcagaatatgatgattatgagcctcaattctggaatgagactaacctggttttaaatcctggctgtgcttcttacaggttgtgtgatttgtggtaagttacttaaattgtctgtgcttcagtttcttcatttgttaaatgtgtatgacacctatttcatagaattgttatacagattacgttaattactaaaaaattatttcgagctcttagaatagggactggcacatattcaatacaaaataagtaataaaatacagaggtatgtatttgaatattcaagacttcttggaaggaaaatacttaatgctgttgaggaaaattttaagcaattagaatggcaactagaagagattttgtaacaaactatagtggattatctcacatatttatccctcattcaggcaactacacatctgagttctctgcttgttactagagctcatggttgctggctccgaatgagaactgaatatgaaaattttcagtttgtgaaaaacatctggagcttttagttgactacaagcttaatatgagccaactgtatgttgcaactgcttaaaagagaaaaaaagaataaaaaaccctgaagaattccttaggcattataaatagaaataagagtgtccacatcatgggaagtaacatagttgacgtacttcacactggccgcatcacggctggaataccatgttccgtccaagacaccataattttaggaaagacttggacaaactggagtgccagaagtctggaaatatgagaaatggaggaagtgggactgtatagtgtagagaagactaataggaactaaaacacttgtctccaactatttatamggttgtcatttagaaaaatggacacgcttatatattgccctagaaaacaaagagtagaatcaatataatgaaagtaccatgtatatttttactcagtattaagggtgaaaactaatgggtaccagtgctgagtcttgcagcaatcatataagaattcctgtatatggccgaagcttacattcagttacattcactaaaataagatttttgcattcatatcctcattgggcttgggcagtaaaggaattaaatcccccaaaagttcattaaaattttagggctgttctatgattgcatggatggttaaaattagacctgatggcactattggttattctaagaaaggagctaaaagtctatataattggtttactttttattcagtctagttttkaaatcttaagaatggatcaaggaacattggatgaagaagggacacagggtaatgttattttcccaaatttcagaaattcttccaatttaggttcagcaggtaattaagaatgatttcatgcatgtcagcaaaaatagtttgatacaggactcattgaatattgtattgtgttgggaactgatcagagaaaaccatggtgtttgtccgtgaactctcgttgctttttatctaagaggggttgaaatgttgcgtgcttttgaattttatcatggacaatacttgagatttgtaccagtacactaagggttatttttaaggattgagtaaaatggaagtgtattaatgggaaatagaatagaagatagctatagtatgaccttggaaactgactttacgttttacaggcatgtttttctttccatatttcattcttgtatcttgaaataagctgtacttatggttaggtatatgctagatcttagaattcctttaaattcatcttgtcaaaatatcagccattctgtatgaatattaccaagtttaagacattggtttatgttcaatttcagcagtttgtataactgatttgaaaaagcaataaataggcttcawaattttatattttttataggaaacaggtaatttaatacatttaatacattaatacatttataatgtatgtattttttcatgaggtagactatgtaaaaagtaaagaagatgatctaaatccagaattaaaaggcacagtcacatttttttttcttttgcagcattggatagtatcagtttgttataatctagaatatataatatattctgtttttacatttcttaactaaatcctctttttaaaatataaataaatatctttaaaataatattttaggccgggcatggtggctcattcctgtaatcccagcactttgggaggctgagacgggcggatcacgaggtcaggaggtcaggagtaatcccacatcgttcaagtcagtaatgaatttatttgaatcaaaagtggatacatttaaggaattgtttctatacatccaattaggtaattctggttggctaaattgagagctggtcataatcccaaaagacacaattctgaatgtcataattctgaatgttaaaatcccagaagagtaaaatctctaaagtctaaaatccagaaaatcacaatccccaaaacatcaaaatcctgaaaatgtaattctgaaaaaaattaaaatattattattagtagtagtagtatttttgagacggagtctcgctctgtcgcccaggctggagtgcagaggtgcgatctccactcactgcaagctccacctcccgggttcaggctatcctcctgcctcagcctcccaagcagctgcgactacaggcgcccgccgccacgcccggctaattttttttgtatttttagtagagacggggtttcaccgtgtttgccaggatggtctcaatctcctgacctcgtgatccgcccgtctcagcctcccaaagtgctgggattacaggaatgagccaccatgcccggcctaaaatattattttaaagatatttatttatattttaaaaagaggatttagttaagaaatgtaaaaacagaatataggccactttacacaacaaaatatgcaataacaacatacatgcttttgcacatataaacactcaagtatgctaatgacagtcatactggtataatagttatgacaagatgaactgtccttataaagaagtaggtcaaaaaaggacaatgtataaatgcgtaccactatgattgatagttgtgtgcaacagctttctaactttggtcatctgaaataatataatgagcaacctaagtcttttgacaagatccatcaaaaactgtgataggttaccaacatatatgtagtcacccaaagagctgagatctcaagaaattttatatttcacaaatgcaaatgtacaaaagaacatctcttcatttactgagaaaatttcaatgtttttacatacgtacacaacacttaacacaaagtaaacatagttcacttctgtgaagtcgaatttgcaaaaaatgcataaaacagaactctcaaagtctctatacagtttatacctccagtaatggaaacgatgtgaagatgaaatacataacatagtgaattgctttacggggtttctaggtattcctcaatcctgtaaagttgacatctacaattaagcccatacgttctagtgataaatagaggtcagaaaaatagcatacgtgggtttggcttctgttttccttctttttttcttcagttattcttttgactgtgttttcttattattaacccttgcctcaaattgttccctgggagagtgctgcaggctacagccctttttcaaatggtgaaaaatttgagagaatagtggtatgaagaacattttgaatgcaaggctgtttagttgtgaatattgcattgatcacatctgtgtttctgaagctctgtgacttgctctcctaagcctagagcaatcttcactgaactaactctgtggggtaaagaaatggttctaagtaataataataggctcactttaacttagaaggtagatattgttgagtgactttagttagcatctgctgcattcaaaacatgctgggaggtgagggattatgaaagagaaagttgaaatacatagatttggacaatagaaaaagtatgtttaattttttctagttattgttgatgttttattttttaccttcatcatttcagtttcttattttgtttcagatacagaaacatcaaatccatgttccatacatcttagacactgatttttttttttatgtcattttgacatccctccagcacccaaatgccaacatctgctacattttgccacacggttgtaggcttgaactctgaaatgcccctaaatgtttttaaaatttctttgtgtatgttttcaaaataaccttcctttgagttctcagttttatgtgaactgtagttaaactcttttttttccatgacttgtagcatatggtatttaactgtttgcyagtatcgctttctgaaatgaacctatttgtacaaaggcattttaagagaacagtgcacttaatcagagaacctccttcaaggtgactctactgcttaaacatggtttaaaaaaattaaaatatttrtggctcagcattgttgtttcattgtctatcaaagttaataaaaataactggcctttgagaaagagtacacctttaaaatttttgaaggccaaatgatttttttttatttttcatccagaartatctatccctaaaggaagagaaactttcttcagaaaggtatttgttttaatcaaggaagtttctgctgagattaataacttggtatcatcccttagttcctgrtaaacatcataccttaaatgagtcttctgttttttaactagtttttcttttgtctaaaacaaaattgcctcttttgttttagagatgaattactcaatttttaattgttttgggggcagggtgcattattttcctattgaagaacaaaatgtaaaacactgccctgaaaggaatatttgcaaaaccatgaaagtgagcaaagttgagatgggctactctatagaaattttgcattttattctaaaatactgtattttgccatgatttgttccctggtgtgtatagaagcattggctgcagcctgaattcctgagcccttcagttctccacttttagtgtatataaacacaatttcactgagcttggaagaatcatgttgtagtgaaggtaatattattggcctctttcttttgttgctttgctgctttgtggagagggataagtttattgtaaaagcttctttaaatccatgttcttatacagggctatagatatcttacccgtcagttccaggcaagtcaccctttctgggctgcagttagccacaatagttaaatattctggttttttggaagatttttaaaaaatctctattctatccacctagttctgagagagtatttccctcagtttgtctcatttgtgggaagaaatattatctgcccgtctttattactaccccaatatcaagtttacatatttatgtgtttgccattctataattacgtctgaaacaggttgattatctattttcaaaataaaagatacagaatgaaatgaggctgtagggagaatgaatgaaccaaaaagaaaaaaaaggttttgcatattttaatttctgaaaagtttctccagtaggtttatcagatgatttttgttgttgttcttcacagaaatgttgttcggccatgtatgttcatgagggaaaaaagttctcatcctttgagagtatgaggattgtatacacgatgtatataatgttggagaaaaaggtttttattagtttcatgacattagtttccttagctgcctttctgagaatggtccttatgtttaagatgggggcatttaagttattgtcaggattaaattcaatcgaaagaattaagtgttaggaaactgtgccttgcctgtcaaatagtgactagtcaggaaaamacacacacacacacacacacacacacgcacacwcacgcacgcacaaatgcatgcacacattcctcactgctattttgacgtatatgtacctatagtatgtctaaatttttcatggtattagattatacttcaattatttgaaattaatttaaagaacagaaactaagaggaatcatagaatcaaagataactatgcgccttatctcaattgtgtataaaccttttgaaagaaaataggttcatttaatagtttaataacacattttgcagttgttgtaaggttcgtaagtttttgtttgctgagtattaaggcaaaatttttaaacaaatgaaattaagtggcctggtgacctggcttcaagtattaatctgtaagcacttttaaaatgcatgcttagcagcatggtttcttttttttacaaatcttttgcaaagagcagtgataatgtgccaatgacaatgaaatatttgaacaagaaaagttgtttttatttatrgagaaacaagtaaaggccctaaggtggttaaatgattgcttaaagtcacacagaagtggcatggctctgatttcccagtttaccagatacttagatactcttttcaatgatggaaaagcaaataataaataatttactttctagatattgttgaattcttactatgtttctgggcttctatgagatgctggaagatttcttaaaagtgaagagggtgaaatggggaggtgttagtcaaagggtatacagttttggttatgcaagatgagtaagttytaaagatctgtgtagtatattgcctacagttaacagtacatactctgttgtagacttaaaaagagggtagattttatgttgtgttcttatcacaaaaaaaggtgggaggaaayttctggaggtgatggataggtttatggcacagattgtggtgatggtttcacaagtatatatatgcttatctccaaactcatcaagttgtatatatttaatatgtgtagctttttgcatgtcgatcataccttaataaaataggtcaaaaaaagaggaagagcttcaattatttttctcttctttcctttttccataccttcataaaaattcagagtgcaaatttcttagtttatttcacctactttctgagcaatattttttaaaacctgtgttacatttcaaaagcaatattcaatttattatggcattgactagaataacttgttcttgaaacttaggtaaatggttatgaagtaatcaaaatgtatctttcagtatgctttttttttgtgctggagtagaaaacccaactaaaaatgatatacattttaataaccaaagtatattatctcacagatggaagtctrgaaggtcttaagggtgactccatcaaggagttctggctccattttcccaggaattctcttgattttgccctcctctaaatgaaacaatgtaattgaagcacttctgaacctcatattcaactataacaatgaatagatgaagagtgaggaagaattttcccagcagcctccaaaaatcctccttttattaacctgactaatctttttttgaactattcccttcgaagggcagtgggatcactgtataaccaaactttggtgggacacagcagacctgtgacactggctcacatgggagaggagtaaaacaccccaggaagggagaaagattatggacagctcaccctgccccttagaaaaactggagactatgtgttcctgaaatgaaacaagacaagtgttcattgcactctgagaatacattatgatgtagaaaaaaatttgagatctataggatatgaaagtggcacacaggcttggaaattacagcaattagtggtaatgtattatcttgggtactgcttggggtctctatatgtaagatgactttaaatatatgaaaattttgacaaacattgatactactctctcaaggaagctgtgtatttcccatttattttgtctgcaatctggtttttaataaattcaagactcaagttaacttttaataaatactgtacatattttactatcagaattttaagaacagcatacgttttttaaaaaaatacacaagatgtaattttagtaaggttaggaagagcatgtactgctggaagtatagttctgtaactacatagacaaaatatatgtcttctctgtcacaattttgccttcagattcattgtttgtagaatgtttcttaaggcttcacagatattgtaatttcttatagatggattgtggagagagatcatgtgtagatagaattcctacrtggtcccagtgttttaagtatagtagtcttctgccactctaatattgaataagaagtgctagtggaaaaattgggtgatcgattacttatttccactctgagatcaggtctcatttaccttgaatttgatttgttcttcctcagactcagtgtttctgatgcaggtggtgttaggctcccacattgttaaaataatgtgcaacattggtattcttttaaaataccattaacatgctttatctttgttcatttgtcaaatcaaggctttactattgaaggtgactttttttttttcctgcgtttcagctgagtttctcttacaatagtcttgactgctgcctgtttttgctcatgactactgattgcctgtaccctaaatcctctctggaccaggaagggaacatacatttgcaatgttggaaacttggagttcgttttcattgaaattctataggggctttgaatttgtgtggggtgttctgtgtatacaaagtatagaaaaaacctctattgctatctatcttcatttaaggggagagccagggaggctgtttagaattaaatgtttttagagagtgtttgctagcttttagtaactcctagacctggtaaggatcaggaccaggcaggtgtgaggactatacctgttaacaaaagcagccctgatccctgtgctgagagggagtatagtgtagtggcagggacggggaaagcagatacatataaaatcatatgacatgtaagaaggggaaactacatggtgctgagaagaaactatgtttatttcatgaaatgctgactgagctaagatctagggagaaatcagaaattaaattcccacaatatcatgaagaatagacttgaaaacagtatgagccttggctttcccttatttgagtcaatatgctgattgtatagagtgggatttattccattgggatcatattttttcagatactaaagagtaacttttagtttgggaagagcaaaatgtctccaattatcccaaggattaaaaactttaaagcaacttttcattcatattaatgtgaaaaagaatccacttagaaagaaatgagggttccacattgaaagacactttagcatttattacattgtgtattgttgaagtaagacttcaggtattcatttgattttaaaatatgtatggagcacctactacatagtaagcattttcctgagtgctggagcacagcagccaatgaagcagaaatgtcctggggggccttgaacttggaggtacttcccatttctcactctgtcatagggaatccccactgcattccttgttactgtagagtcaactgtgagattcttggtcgtggaacattttcattccattactaacatcagttatctctgactagcatttgtattcaggtcgattaaaaatatccctctgctgttgaatgaaatcttagaatcttaattcttctacgtcattcaatagaatttaggcttgtcttccagatttaaaaaaaaatcatctaaggtgcagtatgtactgaaatagtgaacctggaacaaccccatattccaytgatattctttttttttcctggttatacaactgctggaacaatagtgtaacaatgtcaaagaaaatttgtctgggaggtaggaagattggtgataggaaaagtactattattatggacaagctctagatttgggagtcataagatttgagtatggttcctggatctaattcctggtagtaaggaggccatgcrtaagtcgcttaccttgaccaatctattttctacttttctaaaatggtaattctatttgctctgcttaactcacagctcttgtaaggatcacatgagaaatgctcagttgtttttatactgtcatacaggcacaaagctaggggtgattaaattttagaccgcaagtgtggactaaccgttattagtacaatatagtgtcagagctgggcaaacaatttaaataagggaaactggactttgttctccccatcccacccctgcttttttgttttgttttgttttgttttttgtgtttcttgtgttgcattatacgggcaagattgagatttttggtgtgggaggggtttttctggtgtccctcaaattcaattacgtaggtaaaggtggaattgatccttgttactcaaagtaagacttgtcaacaaactcagcattacctgggagctgctagaaatgcagggtctcaggttccactccagatggctggatcaaaatctgcattttaacaaaatccccacgtttattgtatgcaaattttcctaaacagagaagttgacagatttctaaaactaccctgatcattccaaaagactctttaggaagttacrgcttcaatgacagcagctgcgagatgttttagcaccacctgggagaacgggggattgggtgggggagaggggctatactaaaaaacaaaacaaaacaaaaaaaactatgctgctttctgttcccaaggaaacattttaggggtgaaaggttcatattccattatcagtcccctgagcccaccagtgttcaaaaatgtttttttcccaagacttttatggcacttaagtcagactgctcctattggaataacagaccaaaaatgactgacagttatagtgtctgggattagggagaaaaatatttagtgagaggaactgggagtttatcaggagacatgaatgatttcatctccaggattctggttttnnnnnnnnnnnnnnnnnnnnnnnnnnnnnnnnnnnnnnnnnnnnnnnnnnnnnnnnnnnnnnnnnnnnnnnnnnnnnnnnnnnnnnnnnnnnnnnnnnnnnnnnnnnnnnnnnnnnnnnnnnnnnnnnnnnnnnnnnnnnnnnnnnnnnnnnnnnnnnnnnnnnnnnnnnnnnnnnnnnnnnnnnnnnnnnnnnnnnnnnnnnnnnnnnnnnnnnnnnnnnnnnnnnnnnnnnnnnnnnnnnnnnnnnnnnnnnnnnnnnnnnnnnnnnnnnnnnnnnnnnnnnnnnnnnnnnnnnnnnnnnnnnnnnntttacatgtaattgcgaattagccctcacttccagtcatggcaaggtttaggattaaatgatattgaactagctttccccttagtaacattgcttttctttgcaggatgataaagctaatttttaatcatacctcctctacagttttaataattatgacttttcttctttttcctcttttctttttgcctcctgcctggagtcctgagtaaaatttaagattgtgtgtgtgtgtgtgtgtgcccttgacgctatctgattcctttgagtattgactacacatctggactgtgctactaaacaaagttgagagtgttggatgatgtgaaataaatcaactttgagactagagatgagtggatggctcatgacaaaaatttcaggctttatttttccaattttgctataaattagttaaaagtttgttatggccagcatttgggaacctgtgttgcatcagactcagccttcattcaattatttaacatatattgatcatatccctactatatgctattagtattatgggttaggccattcttgcatacctaaggttgtgtaaattataaagaaaagaggcatttacccatacctgaggctgggtaaattataaagaaaagaggcttaattggctcacggttctgcagactgggcaagcatggtgctggcctctgctcagcttctggggaggcctccaggagtttttactcatggcagaagggaagcaggagcaggtgtgtcacatggcgagaaagggagcaaagtgaacaccgggagggtgccacacactcgtaaacaaccagatttggggagaacaaacttactaatatgagaacagcaccaagccattcatgagaaacctgtcccccatgatctcatcacctctaatcaggcctacctccaacattggggatgacaattcaacrtgagatttagaggggtaagatatccaaactttatcaaggaccgtaatggaaatagacttgtactcatacagcttacattttatcctagtagacatgcctttgattgcatagcttgaaaggttgaaatgaactaaattgagggttgtttatattaaataaagctattttcccccaattttagctaaacctctttttatgtaaagaaaaaggattttttttttccagtaagatttaccagtcaaagcaggaaatcattttgttacaattgtcttacaaagcagccctgtgcaaggctgttgctaatgttaagacttttcttgggggtctccgatagctgattctctctcgagaagtcttcctattcttggatgtagagtgttgctaaaaagaattagttccattttctccagagtgctctaagttatagctatttatcttttaaggaagctcctaagtatccacaggtgttcagccccctaaaatttcaatttatcttcagcacagccagcttttcagtgtttactataaggctttaaccacatggtaattcctcccttaaagaagtctgctgtatataatgttaaggcagggttgtcagggctgttatgctgtgtcccaagccaaatacatttctcarcattccaaggttatgcgaatacacagaaataattattttcagatgttgacattgcacttagtgatttagtaatatgagaaaatatggttcaaaagttattcatctaaaaagcaatgcaaaatatagtagagacaaatatggtatgcattcaggcacatactgtgaagtagaaatgttggagtgatttagctttctgtcataacatctttatcacacaggatatggacttgctatgatgtgagttagcatgtttcctctgacacaactagagtccagagatgtgccttgcttctagtccaataatcactttcaatcactgagccagacccatgattcgtggattctcttgtcacttaagatgttgtctttttttttttttgagatggagtcttgctttgtctcccaggctgaagtgcagtggcatgatattggctcactgcaacctccacttcccaggttcaagcgattctcctgcctccacctcccaggttaaagcgattctcctgtctcagcctcctgagtagctgggactataggcacgtaccaccacgcctggctaattttttttgtgtttttagtgaagacggggtttcaccatgttggtcagggtggtctcaaactcctgatctcaggtgatctgcctgcctcaccctttcagagtgctgggattacaggtgtgagtcactgtgcctgaccaatatgttccattcttaagtcagttttgaatgttaaaaaatgaaatctttacagtttcaaaatataatttttctgtaatgatccagaaaataacaataggacttttaaaaagggcttttcttagctttgcaagaaaagagataagagcagaaaggttcactttttgaagagamcaagactcactcagttggaaagttactctaaatttactttttcctaacattgatttatgacattcagtatgaattttgtctgtttatatccacatatcatgtagtcaacatagaaaagggaaaaacctgaatgaagttttattatactcattgattctttatatgcatgaaaggggaaattatcattatttcttaatagtctttaaatttctacggtagcatttgaggaaaatgaaatgaactccatttgatatatgacctattgcacttaaaaatattcagatcactggttattgctgactgcttataaggcaaaatrttttgattttactgtattgttcatgctgcgagcaaaatgggtgtctgctaagtttttattttaaaatgcatatttctgtctttaccttgtagccttgcaatgcgtaattcaaaatgtttgcaaagtacaagtttattatattgtttgtctgcttcttattataactttaaaaagaaaatgggacaccctcctctcaccccaccctagagacagattttccatgacagaatagttttaaacatcaggatattgcataagtcagtctggaaaaaataggaacagacagctagcactatctagtagagctttgcttttgtgacaacattttttgattaaataactctacataaatgataatttccctacatagtttgataccaatatctaagttgatatcaactttcaaaatccataattgtttctgtgtacattctttctgattgtttttatttgggtactgtataaaaaatgatgagaatttaaaagtcattgtatgatataaatccaaagaaatctaattaagctctgagtctaatgagtgtgagagaaacctgttcaagggatgtttcaaagagttaacattgtggtggggtatgaaaaagtgatggtgtgtaggatattgccttgctccaggttttacaaggaatagttaggatttaatttttggcccccaaaagacttaaattttaacgtaattataaggaaaaagaaattggtggcatggctgtgtgatcctatgggttgcttgggactgagtatagtgaaaagtttgtgaagtagacgttaatattcaaagcccatttcagaaaagttgaaatcagagcagtaagcaaaattattctccaagtcccttttaattttatttgctcacttaagccaaaagaactgggataggctgtatctttttcacgttacaatgatcaaactacaggggccaagtgcaattctattcatatttcttttcaagggcaaatctatttctcaataagtcacatcacttacataacacttcttgagtacttgtttactacagcctggacaaagggtatcaaggaacagtaggtttacttggtggtggagtctgaggaaaaataaaactatttgttaacagccagttgtttacaaggatccttatctagtttgtgaaatctttatccctgtgggatgaagagtgtgatctaactcattgtggaagcttagctttcttccctttctgctcctggagctagaggttttccatcagagatggatatattcttttgggattccttatcaatatgccatgccattttagaatgacttcacctatctcacctttgattatttatgagtaaaaggagggagaaaactacccgttttgtgaaattgtttctgacacatgaataaaacattatgtatcatactaataaattataatgaaattgtatgccaggattggatctaattccttgaattattcaacagtgaagctcagtaagttcaaggcactaccacaaagtactgttgggagtataatggatacataagaagtaatactggttaaaggaaaatagaacataattgagaaaaataaattctgcaaatatataattaagtaccatgaagcaattagaaactgtgttatagtccagacttgaaagagattatttcctgaggcaaagggagcattcatggagtagagtagtcattgagtaggatccttcrtggagcagatagtcattgagtgggttctgaagggtgagtggaatttgaacagggagagacctgagaaagacgtagtcgaaggcaacatcattagtagcagaagagtgaaaaaaatatrgtattgaagaagaatagtgcaattatgtaatgggtcataaaatggattagattgacaagttaattctcactaagagccaggtactttgctaaaataagcattttacataaattatttagccctcacagtaaacctaagaagtagaaatgtatggataaagaatttaggacatgatacaactaatatgtggcagcagatgaacttgaaaccagggactggggtcttgaccactaatctctgttccctgatgttggtatttggtactacagggaaggatggatatttcattctgtaagctgtggtcactcacaggatgtttttgagcagagtgagcaatgtgttcctcccaattactctgtctcatctcacccatccctctcttcaaccctgcctttaaactacygagataaaccatttggaattacagatctgatcatatagtgcatgtgcttatgatcctccggggcccacagcatgcatttcttgtttcttcccatggtgtacaaggccttgccaatctctatagcttcatttgtaactactttcctttctctgaaatctccttgctgtattcttctgcttttccttaggttagtgcctcctcctggatgacccttttgcatttctggatccatctattctgctctgcttttctcatttcttgtgaaatattgaactgcttattaaccttcttcttcataaaaatttgaaaatctgtttccagatttgtagttctacaccaaaatggaattcagtcattgacactacctattccatattaaaatggcttttaaaattatgtaatgtattttttaccccaaatttccagtgtgcgacccatattcatgacctgttttgtctattagttaggataggctaagctatcttgcagtaacaacaaccacaaatattgtaatggcttacaacaaaaaagatttccctcatgtttgtgtagattgaagggaagactgcttatcatagttacctctgaaggaagctccacttgacatgttctttcacaatcacataggagagggagagcacatggtagtcacacgctggttctcagcacttctggctggtagtgatgcataccacttgttcatgcatttcactgacctcgcatggcctcaccaaatgtcaaggagacagggaagcaccatcctaccacgtggctgaaagtgggagacgcayggaaatacttagttcacaccactgcaatgggttaaagatctgaaattgtaagacaattcttttgaaatttatgttcactagtagtttgtaatagtgtcgagtcaaatgtagcagtttggaagtgaaaactaaaacaatcctaaagaggtgagattgtatcttttaaaatcattatctcagttgaaaactgaatattgaagcatatgcttaaacttaacacaataaatgtaagcatttcatggccatggcacaaaaatgtgttaaaactatatcgttcatccactgacagtgttgaagaacaaagcagtgtcacagaaaataggttgcattattcttagaaatatatcatgctttgagggatccttttttttaatggaggtcatgatcatctttcataaataatttatcagttaatggtagtgaacagagtttgaatgagtcaaaattctacaatgaaatgctcctgtataggtgtaagtatataaatgtatatataaatatacatatacaaatgtaaatatataaatgtatatatttaatgtgtatttgcccctagtttaatttgtcagcagtaactgctggtttttatttctttttgcaagaaattatatagaaattgatttgagggagatttaaaataaatgtttagtgagaggaaatcttactctgtcctatctatggatattgataaactgtaccactgtattcctaactcctaacttggatataggagcttgactatctgcatagatacgtaaggggatatggctgacaggaggaattacaaatgtacttatttaacaattaatgctgacataagctatttgggtaatacctcatttttttttagaatgaatgatgactgtcagtgtgactgaggatacagacatgaaattaggaaatcgaaaataaatatctgtttccttcaaaaaatttgactagtcatttttttgactagctttttaaaaattgcataagactaactcttttcgtttgctgtgtgtacattaaatatgtctgtataggtccctttgctttcttttgccccacagtaattatgttgaaaattataaacagaggcattagcataaattaaggattaagtatggaaatcataaaaaaccctacttccatgaaaatgaaatttctttttgaaaagagaaataggtattattctacttattttcgtttagcaaattttcttatggaacatcattactctgcctctcagaagatttgccaaagtgtttaaaactccctctgaatgtttgtacttcaataacctattgaaagcacaactgattttgtttgtgctaggtttatctccatttaaaggcagactccttcggtgagctcccctgtggcaatatgagagaaggaaaagaaggagggaggaccttgcaggactggtttatatagcaggaagttaagagacaagagagctctacaattattgagcacaggaaaattgatttcctattcatagtagtgtggcacatgtagaggagtctttaaagatgatacagcatgccattcctttcccctccgttgtgtaatcaaccagccaatatttatcaagtacctgttagtttcacttacagagtacctgtagctgagttttcttttcttttctgctttctttatccctgctctctagctcctgacctgtccatcacgaatatcagttttccatgtgccttagacctgtcttccatctaataagacttcacactgctcacttttcctttctgacactgaatacacataawcaacagagagcaatgtctsttaaacccataaacccattcaaaaaccaaaaccaaaccaaataaaatgaattggttgtattaatttgtatcatccatttacattttgagaagcatagtcaatcagataaacttactgttttaattctaaattcactgactttctgtcagtctctatgttccctrtatgtagcagctgggttaagaatataattgtcttgacaacaaattattgacatttacgagctcaaaagttacctcagaagcttttgaaatyaaagaaataaaagtgttaattctctctgatctgaacaagccaggactcagtgtcagccctttataggtcaggctgtggaaggaatgcataggatgaaataccastgcatgcctggtgcactaaaactaaatgggatttcagcagatgaagggaaagggtgaggaatcaagccttaaattgtctgcctcaggcatggtaagaagacttggacagtaatagaaacaggaagtgtttgctgtgaagcttgagtatattcaaagtaaatcagtttgtgttccattaaggaatcctggctctaggttggagcctacgcgggatcagtaaattttgcactaggaaatacctaatgtcaagccttagaaaacacctcatactgtggccagctgtcatcaaatccatcgccactgctagtaaaataactccaaagcaagtgaaactggcagtaattgcacaagtaaacgggttgcaaaagagcaaaatgggtacgtttcagaacatcatttctgttaggctccatgttatactgcttacagtagaaacaaatggaagtcgagaggtgaagcctggcattaagtttactagtgatccaggaataactgttagcagctgggcctgggtgctttttccctgctttgtcctggaaagatttcacatcttaagggaaatgaactacacaccttgagaaaatttttttttctatcatattgtataaatctgtgtaaatctcattttccccctttttggagttaagtagcataattaactgtaaggcttttccaaatactttcttaaccctgaaaaactttccctcgggacttacagtatagccaaatggatatcgattattgctaaatgtaaatacatatgcacatatgaggtgaagctgtattaaaatatgggtggcagtgtctttaactcagatttgggatgctttatacagtcatgggaaatatcaggggatcaacttgaaattctttaaaagttracaraattttggaacgatcaaggaacatgggaatatggcctcaccttttctttctcactgatgacataaatgccgccctcactgtgttgtttattgtttcttccagataatctttgcatactcagtacttggaatatagagccattgccctgtactcattttttccttcctggaggtataaatagactgatgacgccctatgctctctgcagtctgtgcatcattcataccgtacatctcctttctaggtcacaaagcttttaaaaaaaatcagcagtggtagcagcatgtgagaagatgagcatatgactgactccttcctttcacctcagagccgtgcctttgatagcatccagacagcagtgcatggaaacatgacatttgggtggttcaagaatatcagagggaaaaatagccattcttaccaaataacttaaaaatagcatagtctgagcatttttcccttcgccctttctcccccaacgtgcctgaaatgaagcccttcccatccaaagcaaaactaggaatttgtgttttgtgagaatttgaagagcctgcctctcttactacaactgctttcttccttccaaatgtataagcttaagtcgtgagaaaatgtcatctgtctcattctgcttccctctctagtaaaataaaaatggtcatgctttcagacggtcatgtattattgagtgcctactgagtgaggaaccatgtgttgagtgttttgagatggggtgagggaaaacnnnnnnnnnnnnnnnnnnnnnnnnnnnnnnnnnnnnnnnnnnnnnnnnnatggggtgagggaaaacattatttttctgctttcctcgagcttcattatgtgttatatttcatggtatctaagccaacagttggcgagaaggctgatccttagaggtaatctcacgttcaaggaaggtcgggaacaaggttggtgagtagtggggacagagttcttgttaccactggagtttgtgtcctggatgccaggtatacatcatcttattctcttcttgatttgtcagtactttttagggaccattagttctctgcctactatgtgccagactctaccctaagcatttagaattccagttaacaataggtaaatcttctattcatttaaaatttcattctaacagctagtaatgtatttggaggaataaatgccgtgaagaaaagcagaccgagtgttatctataggtagttatgggagatgtatgttatcttatattggttgatcagggagacacaaactgataaaggggcgattgcttatttctctgaaagaagcaaggaaatgagaaccacctggatggctgagggaactgcagtccaaggagaaaaaacagcaagcgtaaatctcacaggtgagggtgcatcagtggagcaagggcaagagtgttatgataagaggtcctgaaggcagcagtgagaaatgccctggaagcctgtgccagacatattgaggagtgtggattttattctgataaagacattgcagaggagtggcatcatttcacttgctcttcagaagagaaactggaacacagatgggcaaaggaggcagcatgagacaagcctctctcttgcaagccatccggatgagagataacagtggcttggaggtgacagtgaaggtggtaggaggatattcttaaagtagagccagttgaatttgctaattgtgatattgtaaaatatgtatttggtcttcatccctgttttctgtcatacagctcctaaaacccttgataagaatatcctttgtgtgctaataagacgactagtggctggaggcccctttgtaacttctggatgggggctggtcaccagaatggtcaggggattgggactttcagccccatctctcaacctctgcagggctgaaggttgtgttgattactaatggccagtgatacagtcagtcatacctgtagaattgaagcctctatgtaaaacctaaaggacagggttcagaggacttytggatagctgaacatgtggaggttcctagaaggtggtacaaccacccagggaggacatgggagctctgcaccccttctcctatacttcaccctatgcagctctccaactggctgttcattcatatgctttgtaatttttttataataaatgggtaaataaatatgaaatgtttctctgaattctgtgagctgctctagaaaattaatcaaacacaaagaggtgggttataggatctctgatttataactggttggtcgaaatacaggtcacaacctgggatttggaattggcatctgaagaggggggcagtcttgagggactgaggggygatgctatgtccaggtggatagtgttaggattgaattgaattagacgatgctcagctggtgtctgttgaagaatctggtgtcagaagtgttgagtgatgtgtgagagtaggagaaacaatggtttttcctacattctcttacactaatggatttgtattcggagagattggaaagatggatctgtcatttmctgagatgggaagtcacagcgaggagcccattaaccatatattaaaactccattagtaatattaagactgtccattctagaagaggtggtggstcacgcccgtaatcctagctagcactttgggaggccgaggcgggtggatcacctgaggtcaggatttcgagaccagcctggccaacttggtgaaaccccgtctctactaaaactaccaaaaattagccgggcgtagtgctgggcacctgtaattccagctactcaggaggctgagacaggagaatcgattgaacccgggaggcggcggttgctgtgagccgaggtcgcgtcaatgcacaacagcctgggcaacaagagcgaaactctgtctccagggggaaatattagtgaagaggacaatattgtaacctacaaaaattctgtggtaggtatgttacttttgttaacagacttttctgaataaagtactccaaagtaacttggagttaagacattttaatattatgccttggttttcaaaacatgaatggtttccttctcttttcatgaatttggatatgaatgcaggcacttacctacgtaatttctaatattgatgatactggtgtttcttaaattcactaaaaaattttatttgtaaagggtaacctgcgttacattatttaaagtttttattttaaggtttttttttttttttgagatggagtcttgctttattgccctggctggtgtcaaacttttgggttcaagcagtccccacgccctagcctcctgagtagttggaattaccacattacattttgaaagaagagagtttacaaatgtctgtttccatgcattttaaaagaggtcttgttacaaaagattcagttaatctctttaaatggaatttattttggtttcctacttcctccattaaagtacattaatccttcttaacatatgtatttatcacctgctggattgctaagtatgtaaaagctactttgtaaaagcaatgccgtagctaaaaaaatgtattgcatagcagccaatgtgatttagccatttcaacattgcattttattaacaggacactccagacctaaatggtgaaaagatttcccactcaaattgtcccctagcaagagaagattggaatatagaggaatctccttttctcctcgtgattctgccttttgatgaagtaataatctgtgttattccagttcttttaaatgttaattcattttaacagttgcttcagaaaataaaattttatgaggcaaaatacagcaaartatttcaacaccacatttttgtttttccaaccagagtttgtttcatttacagacattgtcatttattttttatttttattcattttttagaacatcttaaatttttaatcctttatttacaggttgcctagacgacttttgattaagaaaactgtagaaagttggtaactgccaaagtggtaggcggtggcacgtgtcagtttccacagagtccttccatgtggggtatctgaatgcactgcacggggtctctgctcacacttactggagccaattgtggcagattttagtctacaagtcgcttttccccctatttctctgtaaacttcagcattcttacagaaatatttacagtccttagagtattattcagctaggtcagcctgaagtggatgctcaggctgggggtcattcaccagtgctgtgagggactggattacttggtcagttttggttgctggcttccagttttcagcactaatttactggcagagagacctgccccttttagtggacatttgggtgacagatctttaagtgtgctcttcggtggtttgaatgggtgctctgctggaaagttgatttcgattctgaaggcccccttatatggagggttgtcaggaacaataagcccttgccaagtcaataaattagctccatctacctggaagttacggaagtttttcattccacaattgcatatttcttcaagctccttcatcagccttctgctggtgccgtcttggatttgatgctgctcctttcccagaatgcatcgcagcccaacattgccatttattatgctttattttgttgagcttgatgctttgcattagtttgtttacttattcaataattatatattgagtgcttactagagttgtctagtttctcaaaattgtgaggtttatgctaaacactggggacacagcagtgaatgagacctagtccctgtcatccaggggccaataggtcacagatgtgaattagccctttcccttgacttttgggattccaatttcaaagaggttgtaaaagagasagtgccatattcttgaaccttttagccaactaggtaaaaataaattttcacatatttctattgagcccactggacaccaatatactttaataattgtgtttaaaatagaaaactccttcarcttgaagctgtcttttatttgagaaaagtgaaaaagagattcgtgggatattataaaagatgaacaagatgcctaaaatggacaatgctcctttacatgttactttaacatttgagagaatgctatcaaaatgcagaactggctaaaagtgttagaaggagtagttcaagttgtcttcaaccaagagtcatctrgaatttggctgcaccctggtatatcaaatacgctgtatgggaatgtgcttatattttgatgagtaatgtgtttttataacaaatgaagatgcatgtcagaatgttgagctggtcaggtctcactagggatttgaagaatagcataacagcaagtgggcaccaaagaaaaattgagtttacttggatacacgagaactctgccttctgacttggtctgagaacttgttcaaggcaagaaacagtttctaacttcagctgaatcacagtgtgaaggtgaacaagtaaaaaagctcagttacctgcagaaagttgcttgcagtttcagttttacaaagctcactgtttaaatctagtagttaccttttaatcccttcagatatgtcagcaaaaattctagtatttggaaatatgccttgatcacttgcaaaaggctctggaagacagaagtcatagtaaagtgtcaggtattttaagaatctggttcaaacttccaaacaaagaatgtttcagacctcagtgtattaacagttttcctaactattcagttattcggtggtcttttattttttatttttatttttttcgaggtggagtcttgctctgtctaccaggctggagtgcagtgctgccatctcagctcactgcaacctccgcctcctgggtacaagcaattctcctgcctcagcctcccaagtagctgggattataggtgtgtgccaccacacccagctaatgtttgtatctttagtagagacagggttttgccatgttggccaggctggtctcaaactcctggcctcaagtgatccgcccaccttggccttccaggtctcaagtgatctgcccgcctcagcctcccaaannnnnnnnnnnnnnnnnnnnctgctgggattacaggcataagcaagtacacccagcctcattaccttatagtttttaatttttttgtgggagaaaggaccagtgacttttttgaatgtgagaagaatcccaaagcaaaaggtgatttatttcctttcctttaattctgccacaatacacggcaccccagcatctagaagaatcttctcatgtgtgagatgaatgtgtttgacttcttttggaaagagtcagattttatattcatttagaaatatctgtgcctataacgtggttgcagttgtacatggcacacagttgtttatttaactgtgtttcatcctttcatcttgtgtgggatgctcacacttaaccgcatttctcttcattgcatagtgtagccctgactcactggctcttcatctgatcagtctgccttgcttttgtatctgaacagtatctctcatcacctgaccaaaatgctctgctccgataggtctcagcttagatgttacttcttggaatgcttccctggacaatgctttccatattcacaaagggagtacttaatcccagtaaaatattagtgctcctgaattgtgtcattcctctgcatgcatcagactagttctcatcgtggttcatatagtctaacgcgtgcagatgcaagattagtctctgtcttgttcattgttcttcttagtgcctgatttagcacatgaaatatagcaatcatgcctaatgagtgtaagtgaaacaaaataattttttagaatttggaagtcatttgtcttaatgtgtatttttctcccttttctggtcatcagcattagaactgaagtcatcttcaatatctctctctctcatcccttcattaaatcattcaccaagttttgacagttttcctttgcaatgtgtctccaaatggtcatcctcttctcctttttcagattaggattcttgttttctttactcattggtaaaacaagtttgggaaatgctagttacgcagttaatggtgtagttaccgcaggacttgacaaaacctctaatgaaagaataaaacatttgctatatttgtttgatcagagaaacttttttccatctcaggggatcttatgtggttaatgatctgcaaaacccacctgggggaatgctggtagaattgtgcaacagtcaccctttcatcacgggctgtggatcatttgacttgaacttaatgatagacatcagctatagacagcaaacacatggaagggaagcatgccagccccctgacactgaatggcttctgaccctcgcactctttgggtggctcagaccatgttaccttgattaggtgaaggggccccaagtagggaattatgcaccttattcacctgctaaagacactgctaattcttcttgcagtacttcctcaatgctgtcttgataagatttaaagagttttttagcctctgcctttaggcaccttcagaaagaatgccatgtactcctatttaattcctgcctacaccactgttttgaatctgtaggtgcaagggatttaaaagccaaccacaatgaagttgagtttttgtttcccagatttgtgattgactggttttggatgacaaacttgatnnnnnnnnnnnnnnnnnnnnnnnnnnnnnnnnnnnnnnnnnnnnnnnnnnnnnnnnnnnnnnnnnnnnnnnnnnnnnnnnnnnnnnnnnnnnnnnnnnnnnnnnnnnnnnnnnnnnnnnnnnnnnnnnnnnnnnnnnnnnnnnnnnnnnnnnnnnnnnnnnnnnnnnnnnnnnnnnnnnnnnnnnnnnnnnnnnnnnnnnnnnnnnnnnnnnnnnnnnnnnnnnnnnnnnnnnnnnnnnnnnnnnnctgcccaccttggctactcaatacctgggattacaggcattgagccactgtgcctggcccaaacttgataatgtagaagtcatttgctgaggtaccagtatacaggtggcaaaaacaatggaaagagagaacgatgatttgtcaagagtatctaagaactaagtaaaatagaaagttcaattttcacttaaaggagccagagaggaaaagcctgtaaaatgttagatactttttgtcattgttttgaatataagtagggatcatgttcgggaaatcatgttgttgacacattgataatcccattagatttttccagttgctccgagtctcccttcctggctctgtttctcttacatctcagattcgatctatctgaaaattttattccacctgacttcaaaatagctagagtctcaccatttaactatctacacagttaccatcatctgttgccggaattatctgttgcctgcttccactcttgcctccttacagtttactcatcacgcagtggcagaactaatcctttgaaaggtgaatcagaccatgccatttctctgcaatcttgcaattgccccaactctcattcagaagaaaatttgacattcttcacccaggcaatagacatcagctatagacagcaaacacatggaagggaagctcagccgtcatctgtctctgtgatatctttgacctcgtgttgtaacactttccccatttactcactctagtcacatcagctcctggctcttgcttgaacccgttaagcatatatctttaccttggattttttgtgcttactgtttcctctgcctggaatgtacttttttccagtgtacacatagattattttttcacttccttgcctgtgctccagttttcctcatgaatacgcttaccctcaccactctatctttacctaactgtatttttctgcagttaccagctgacgtgttattgtttgtattaccagctgacatgttattgtcttattggctgccttctttaactagaacgtaagctcagtaagaggagggctttgtttgttgtttgtttatttattaccttttaagttcaggggtacatgtgcaggtttgttatgtaagtaaactcaggtcatggaggtttgttgtacagattatttaggcactcaggtattgagcctggtacccattatttatttttcccgatcctctccttcctcccaccctccagcctccaatagaccctaatgtgtgtcattcccctctatgtgtccatgtgttctcatcatttagttcccactcataagtgagaacatgtggtatttgattttatgttcctgtgttagtttgctaaggataatggccagctccagccattttcttgcacaggacatgatctcattttttttatgactgcatagtattccatggtgtacatgtacctcattttctttatccagtctaccattgatgggcatttaggttgattccatgtctttgctattgtgaatagtgctgcaatgaccatacatgtgcatttgtctttatgacagaacagtttatgttcctttgggtatatacccagtaatgagatttctgggttgaatggtagttctgtttttagctctttgtggaattgccacactgctttctacagtggctgaactcccaccaacagtgtataagcgtttctttttctccacagcctcaccagcatctgttactttttgactttttaataatggtcattctgattagtgtgagatggtatctcattgtggttttgatttgcatttctctaatgctcagtcatgttgagctttttttcatacgcttgtggccacgtgtacrtcttcttttgaaagtgtttgttcatgttctttgcccactttttaatggagttgtttgttcttttcttgtgagtttaggttccttacagatgctggatattagacctttgtcagatgcatagtttgcaaaaatgttctcccattctgtagattgtctgtttactctgttgataatttcttttgctgtgcagagctctttagtttaattagatttcattggctttatcttgctcattgctaaagaatagtgcttgtagcaggattctggcatgtagtaggcaggcaccagatgcttgccaaataaattaagatgaaagaatgtgagagcaagccctcttgtttgttatggaattcagtatttactaggaaagggtaggctgcctttcagtaaatccctgtcatgtctctatgtttattctaaaattggtaagctttctaaccataaacaaacagataaacatcatattaattgttcctctcctatttctctccttttcttttgtagcatgatgtttttgagtattcaaaaacattaaaaagattgggaaaggtctaagaggtggagagtagaataatccattcagataactcctcttgggtctacgtgaacagattttaggtactgttactgtgtgatggatctgaagctttcctgcatcaaagcgttcatccctggaacattcctatcaatgtaacatacttaatgataaattggcatttgaccacaatagatggtatttttccttaattaaagaaatacatgagaaaaaatgttaaatgttatgaaatgattaaaaatgaactgtccattttaatatttatatccaggacgtcgcgacaacctgtagcttccctcatgaagggatcatctctttcgcagcactccttcgatgagcaggagagtgtatattttagaacctttagagagaattggaagcatttactacgttttcctttaaataagtttgctgagtgacaggaacaagtcagatagcttaagtttgctaaaatacataagcaggtagaattttaaaatgctgaattttgtaatatgttccctgggggttagtttgcttgtgtaatatatcataccaccaaggagatactatacaacaaatctggggagaatttaataaaacaagtattagtgtttcacattcaaaccataaagttgacttcttaggaaattgtatgccccaaatattgatggaaacatgtatctctctgtattgcagcatgaaccaaaccctatgtaaactaaatcgatagctccaaagcaaaaccaacttataataacagaccagagttccagtaattaaaaacgtgacctactctgtacaatactctagctatattaatgtggtaataaagaattattaccaaaaattcgctggaaatgcaattatgtatatgtgtgtccatgggtagagttgccagacattgcatgggggtgcaactagtgatttggttatttcagttcttagaagtttaataatcctttatagctcccttttatctttacagaatagcacttgatgactggtaaaaagaattaacgctatgggcttgcccacaggaatcaagcaaagggcgtatgcttttggatgagtttgccagctggggaccatactgagaataacggttctctctcggactaagcattgagatgctttgtcaagtatccttagcttctgctttctcttcccttggttgagttataccaaagcctccttccgggaaatccctttagtccttttttatacagtcaaatcaaacacttctttatcagaagtgcatctatgtccaacaaaaaacaaaaaccacataaaaacctgacaattcacgtagcaagaaaatttcaagcaaaatctaagcaaggacattggcaaaggaattcctttctaatatgaaatacactacagaaaaagtattctatttcctaattctgagcagggaaatttttctatttattgttattattattattctattatatattattctattctaaattttctatttttttcatttagttttgctcttaatattaacattgctatactgagaccttaaatttatatgggtagcttagatttttctagggctcccaacagtattatacttgtagtatttcacttatggatgaaacaaggcgtatatgaaataaaatttatgcatatacatgcatgtaacacataaaaatatttgcatatatgcacaacttaattcctgtgttttatttttcgttgtacaaaatattttaactgtaattctatatacacacacattatacatataaattattatataatgttatcttagtgattgacccagaatagaatacagattttcttaagtttcaatgcaactagatagaaaaggatataatgtctgtattcaaagtaagggttaatctacttttggtaggttaaaagtagaacattttcttatctgagttattatatctgttaaaaaataacttgtaacataattaaatgtgtcatagttggtttattgcaatgctgtaaaaatttttttaaaaagaactgaactatgccctgattaaattaattaacgtgtcacatagattgccatttagaaaggttatttccctaaaattgctgcattttgagcctatcttctcagtaagttttcacaatgttatttatacagttagatattatgattacttttgtgattcgtttagatactaactttactaattgacagatatgatcatttaccttttttcttcaaaaatatttctagattttttcttcttcatttcagaaatttgaatcattttatatactagtgaattttcatcattttgtatatgttcatcttcacatagatgcatttattatttataaagcagttannnnnnnnnnnnnnnnnnnncagtgcttggtgcctttgtagctttgcctcaagattgttaatatgtttccctgaaagtcctactattgattgactcatatatgcctctgcagttcccatttctatctgatgtagtattgagtttgttgccactatttccttgttttttcaagaatagtccttttacttatcctcagttttatcgaggtatataaatattaagctttccaaaaaaaaaaaaccaattttgggttgatgttagacaaatctttttgtataggtttaagagtgtgctgggttacattttagaaatagcatctgatcagtagttctctcccaccttcttactaatgtgcccttagaaacacaggaaaagatgtatgcagaaaactgtggtgacattcaacctactgcctgcctgggaggagttttcactactataagcagaaaaaactggcaagaatgcctttcttgtctttctacctactgtcagacaagtagagcaaaagaaagccccccagagaaagcccctcagttttgctctacttgtctggtagataggaagacaagctgtccttcctgagagtcagaaacataagattcagaaacacagagctattccagtgaaaagcaaagacagacattaggatactgtccattttttgcatggatacagcctttgaggccatcggactgttgtctacactacattatatagtcattaacatggtgttcactgtggttcacagaatgattgaaaaatgcttatagttaaaccttaagaaggcacagaatttgaatttatacaaaaagaatatgtaagggtataaaaatatgtaaataaaagtgcctagatgcaagagtgatggaaataagtcaaatgttagcagtgctttcttatcagatggagaaattatggaygacttttccttcccagtttagtgtttctttgtacctctgaaaatttgtacaatgtacatctgttatttataattttgtacattgagtgtgtatcaagttactgtttaaacaaaaggaaagaatgggtagaaaatataagacatctatatttttataaatactttttaatatccataatttcatgtaaaattttcaactatcccggaggtagacttttattgatattttagagttatgactaggatagttgtgaaatctttccaactccaaaccccatggtcctcctactataccttgttacaaacagaaaatcatccttatggaaagccttaaaggcagaaaatatataaaataagtataagtatgttatgtgtataaagtaaaaattttaaagacatttttgaggttattagcataatttctatctttttaatttacatacaccttttaatgtgtttgttactagtgatatatgaagaaaaaataatgtataatttcaccatcaagagattgttttacattgtagagcatgttcttcatattttagtgtgtgtacattcatacatatacattcaaaggtttcatagcattaatctgaaatatatacttcaaaagttttcaatttagtaccattaatgatgggaagataatatacttttgagttataacggttttattgtgtatcagtagggcccgctcagaaaatcagaacctactctaatataagcagtaagatattgaatgaaaggaatcaattacagtgataacagaaggactggaggtacaaaagagagaaagggctgttatccaaatatcagaaggctattaccacccaaggctggaggccatgaaatagtgtttgatactgagttgcaggagaggctggtgcttctgctgcaatattaaaacagcattgtgccattgtggcatagcagtcttctaggagccaatactactaatatctgtgaaactctcaggctggataccatagtcacctacggtggctgtcagtagccccctgctgctgttacctcagcagaaaaaaatagcctatacttcttccaccttcaactctctaatcaatgcctcccactggcaggacctgacaagaagccagctggctaaggataaagaaaaatgtagtttagagtcttcctgcctcctgtgaatcagaaagatggggatggagttgatggccaataaagagtttgcacacatttgttcattaattcattttagtaattttcttctttcatactgcttgttttaataacctgcaagtaaataatccacaataatgtcaattcattggctgaaagcgtacaatgtaatttattaaaggcaaaatattgttaggaaatgaataattggagaaataggatggtatcaagaaagatatatgtgcttttctgaagcatctcatacatagtttataagaagaatgcaatatgaaaaattaaaatcagataaatctttaagcttttggaataatatgaaagttttatatggttatggcatggtagaattcacataactgattagttagaacaaagacaagactactttttcattatggaaagtaaacatagtagtcttctcaagattattagcaaattttccttaaaatgcttgcatctgaaaagatggcttcagcctgattattttaaagcctgtgtrgttcatcagtttaagtagggaagtggracttggcgatctcagaggagttctgtagcctccatgcccctgctccccccttttcatggctcactactgccattcacataagcaaacactagcttccctcagtcattcagatcatggatgaatgccattctgtgttagcttaaccaccatcattcttgataaaatataactttttacctgagtaatgcatacctagtataataggctacagtatttcttgaaatgtagagtccgtatcagtggtggtataaaagattgttttacatgcaaygagatatgctggtatataatattaagtgttttgctaaattrtttgcctttcatttctactctaatgttactgattaagataaggggagcagatctcaccttggagctaggatgctttcatgtccctccaaccctcactgattatctttgtaacagagagcaggcctcaggctaggagtgtttgtcagaaaaaaaaaaaaaaaaaaaagaggatcttgtgagaattgaaagagatagcattgtctttccttgactttagttttatggccactttgtacttatataaagtattactgagtttccatttaagtagtgacataaagttttaaaaaataaatccaattggaaasaaaattttatttatagaagactaagtgtacaatattatgggtggctggtccataacatggtagaatcaccaaggtaattgctacatgaataattgaaattttggaagcagtaatatatatagcacatttgcttctatctttttcttctttaattttacataaagatataaaacagaactataggcttatctagaaaaattagataaacataatcattcatctacttctttctctaggtaatgtatattaagctttgggcccaacccagtaactaaatgggatgatggtgatgacgattattattgattattgttttcttaaaagccrtgattcctattaaaatactcttgtagcaaattgtaatgaatttttcccagttggtttaccaagtgcgtaagaatcagatatcagtaaaaatgtcaaagtatacatttataatagcctatcttttccccagaatggcttattattatctctctgcagtgtatcagaatataaatagtattagaaggttttaaaaatatcaattagaatgggaatgaaaggaatactgaaggaaggaaaagagatgaagtgacgaagcacttcttttggccactttcctgctgcatgtctcactttgggtgctacttagawgtagatagagttggcaccaccaaacagggttattactaatcttggatctcacatataacttttaattttaggttgaaaatatgagaaaagtgttcttctcattgacaagtaattagccccagaatttccaaatcaattttgaatatcaggaagattaaaaattgaactactagaggccaggcrcggtggcttatgcctgtaatcccagcactttgggaggctaagatgggcagatcacttgaggtcaggagttcgagaccagcctggccaacatggcaaaactgtgcctctactaaaaatatgaaaatcagctgggcctggtggcttgcacctctagtcccagctactcagaaggctgaggcaggagaatcgcttgaacctgggaggcagagatttcagtgagctgagattgtgccactgaactccagcctggtcaacgagcaagacttcatctaaaacaacaacaacaaaaatcgaatttttttttggttgtttgtgaagattagggtcagtaatagaccccttttaataattgtatttttctcctcagagtggccgtatagataattctgatttgtttgctctattttaaattttagtttgattttttggattttaaaaaatgttattttcaatgtctgaagtttttttattcttcatttactctaaacatttacttcaagctttcatgcaatttggtattcatttgttaaaaacgtcttgtaaaatatcaacatactttaagaaagtaaaagctatactttttttttttatgagtcagcatctcactctgtcatctaggctggggtgcagtgcaggatcatggctcactgtagccttgaccttccaggctcaagggatcctcctacttcggcctcctgagtataccaccatgccaggctaatttttaatttttttgtagagatagggtctccctgtgttgcctaggctggtctcaaactcctggcctcaaacaatcctcttgtcttggcccccgcaaagtgctgggattacaggcatgaaccactgcacctggcaaatctatactcttgattatgcccatgataaattatctcagttataggacatcatctgtgtcaatctaaagagaggaataagaagagtagctattgccaccaatgagactttttgagaataaacatgaaaataacttacagatatttttaagttccaggtatcaaaattgttatagtatgaaaagcaatagagtagttgtcagaaaactttcaactcatcagtgacagagctggagataaatatgtgctgtctgtacatctccacttctttataaaatgaaaataattatcttttcctttgctacctcactgtgttttttgcaatattaagtatatagataagtaatttgtatgtatttttaaaactcaacataattatgttatacttgttatttattgctcaaatcttaatgctatatacctaatatctaagcatgttgtgatttattcctagatgaagaatcatctaagcctatggtaaatatatcaaaaggtattattttgcttatatcatagcaaacaatctctagagctacaaggatgtatagctgcaaatagaaaatatattttctgaaagattagtgaatctgctcttgttgttttcatatttctttcagtagtctctcaatatatttttaaatattacattttctacttacaaaagtagtatgtacctgctgaggaaaatgcagaaaaacattaagaaggggacaaaacatacttaatcccacttcccaggctggggaactgtttatattttggcatagttcctttgttttgtgtctgtgtgtttgtgtgtatatgtattgtatatgcgtgtgtaattcttgttttagacttttctattttacaaaacgaagaccatatggtataaagaatgtggacaccctttatagatggattttccacttaatttatttctttatctgaaaagcagaacctttaatattcattaccacttagtttaggttgttaatgataatgtttactaatgatactgttaggctcacagttcattttatgttgtaatcattattctgcacttgccactagatggctctgttctcagagtgactatttttccaaaagaaaaagtgccctgtatcattgaaatgatgggaaatgttattgcccttattaacattatatggaatgcacacaaatataattgcataataattcaacagagtatgcctgtgataatttaaatggtatttcaatagatccacaaatttaatatatccccttcaaaatgagggttatatttacttagaaagcaatatattcacttaacaaggttcactgtcacttagtaaatcaatattggaattattttttcagctctcgctttttatatcaataactttgatattgagtaagttgttttttcccattgcttggctaattkttatcataattatcttttctgtacttcagtatgatgactgtccttctgtaggcccaagaaatatactctatataagtaagattttcttctggatggctattacggtaagatgttttaccgtgagctgaatcatgattactctcaaagccaatctggtttcaggtgggtcctaagcccatgctaatttctatggccaggattgtacactatgcaaattttcattttccttgaagagtgagtgcaggactataaattgctgacgtgggattgaataaaatgagacacatggatacagacattagtttctcatgtgcaaagaagttgtggtctttgtttatacagggctttctagacatacccagctatttaccatccaatcatattttatagagagaaaaacagatattttaggataaacattctcaccacatgatgaactgataacatggcacactctatttatacccctagcaaatctcagtattatgaattaagaagcagttacatatgagaatatgaaattctaaaaatgaaattagaagtttagccgttgtgcataactcctgtgttttaaggttcatcataccccatttttattttcaatttttaaaaaatatttagttacatatagttcattaaattccaggtctaagttcatcaaatcttcctttctgaggataaaagtcgatgaagttggaggttgcttaacaatttcttctctttaatagcatgtcatagttttcatttttgcagaatatgtattccaagaatagagtagcccttatattggttcatattacgttgttggattacacacgctcattcacagctctgatggtaaaattttctaccaactccccaagctaagtacttacgtgtgttagaatgttaattctctaggtaatttttaaaaatttatttattttattttatttatttgtttatttttttgagacagtctcactctgtcacccaggctggagtgctgtggcacgatcttggctcactgcaacctttgcctgccaggttcaagcaattctcctgcctcagcctcccgagtagcgggactacaggtgcgcgccactgtgcctggctaatttcttgtgtgtttagtagagatggggtttcaccatgctggccaggctgatctggaactcctgaccccgtaatctgcccgcctcagcctcccaaagtactgggattacaggcaggagccaccgtgcccagccagtacttttattttaaaaatttaaaatggtagcatgtcctaaataaaataggaaatataaaagttgaaagtcctggagatggatgaaatagggaaagaaggtaggacaaacagttcctacttcttagaacttgagagactatatctaaaagaatattccagaacagggaagtgttataaataataccaacttgtgccaaaaaatattactcatcttagatctcccttttggggattttggatcaataagaaaccacgtttcaatggaagtggtgcagagcccgttgcctagtgtgaagagccaatgaactaagtcagcaggttaaaacctgaccccctggcccatttatttttctgtctttgcactcttgaaaagcatgttccctagagatctatccaaatagtcactggagtcctgaggccccaccctttgtccagtacactgaaccgtgttatgcaacatggaaattgttcccattccaatgcctgacagccagactcttggaagacaagcaaagaaacaggatgcttctacggagcacaaacacttagcactgacagctacaatctgtgaatgaaactattttttatatgagcaaataattttttaaaaatccaaatattatgaagcatataaacaaaggttctaataattaagagttcttgctgaatgcaaagcaacaattctcctgtgtttcaaggaggagaggaagaagtgaatgagatacacagatgccattcagtagaccatctaacagggtgcgctgagttgtatttaagtgattataatgtgatataatgagtggtcatgagtaatacttcgaatgtgaatgctttttaaaattttcagtgtacttttaaagaaattatttaaaagttaaattatgactagtgtattatttttaagtgtctcatataaaaggcaattttgtctctgtgtgtttctggctctgtttttcagtagttgctgttctagagaaatctaatgtgaatataaaaatcacttaatctattaataagtatgactatataattgtggctttgtgtgtgatagacgaagtttgaattttaggataagtgttttcttttctttcttcttagccatcaccgcctgtcccagttactaaaggtacctctcttttcctctcatcaattttttgtttgaaagataaatgagatcttcagtgtgtgcttaagtcattttatagttatgagtgcaaaaaataaattgccatttgaactccagagttgaattcaaatttttcagaaataagcacatattttatttgttttttgagacttctttgtttttctcattgttgggtgggtagccttttttatatatgccttccaaagcttctttcctgattgttgaattacttatatgttagtttaataggtacattaattttttctatctaattgggagtgaaagaagactgctgttaaacatgagttcttagttattggttgttttcatcttttaaaattttctgatttgaggagaggcagatagacttggttaaaatgatggattataaatatgtgaaatgtctgaatgagatcctttaacaaagaaaataaaaggaatgatgatgcttttttttttttgtatatctaggaatctttatttctgaaatgatttatattaataaagatagtgtaggaatgactttctatattcctgcctagtattctttctgttaatttatactctagatgttgtcacaggaaatgacttataaaaatgtatttattatgcttgcttatataaaggaggatttttaaagtctttattttattcttgtatgtgatacactattaaaaacattgaaatatacatctgccgttatcttttactagattttgaacttcttccacattttaaagatatctactnnnnnnnnnnnnnnnnnnnnnnnnnnnnnnnnnnnnnnnnnnnnnnnnnnnnnnnnnnnnnnnnnnnnnnnnnnnnnnnnnnnnnnnnnnnnnnnnnnnnnnnnnnnnnnnnnnnnnnnnnnnnnnnnnnnnnnnnnnnnnnnnnnnnnnnnnnnnnnnnnnnnnnnnnnnnnnnnnnnnnnnnnnnnnnnnnnnnnnnnnnnnnnnnnnnnnnnnnnnnnnnnnnnnnnnnnnnnnnnnnnnnnnnnnnnnnnnnnnnnnnnnnnnnnnnnnnnnnnnnnnnnnnnnnnnnnnnnnnnnnnnnnnnnnnnnnnnnnnnctaaaaatacaaaaagtagctgggcatggtggcacgcgcctataatcccagctactcaggaggttgaggcagaagaatcacttgaacccgggaggcggaggttgcagtgagctgagattgggccactgcactccagcctggcgacagagcgagactccttctccaaaaaaaaaaaaaaaaaaaaaaaaaaaaaaaaaaagagttgcttaatggatgagaacgtttcttgaaacacttataaaattaatagcacattttctttttgtagccagctttgtgattttgtcccatatgtttaaacaaattaaatagcattgtttaggttttaaaatagcaacattgttctattaggattgattttgatacataaattcattatgacatttatttttccatttgcaattgatttctgagtcttccctttcataccctgagctgtctcagaatcatgctttctttctttttaataacattttgcatgttatacattttacatttgtatgtgttgcttcttatcattagtcttttgtcttaaaattagaatggccaatgattatggtctgtacttgcctgtgatcttgagcaagttatttaacctctctgaatctcattctgtaatctgtgaaattggcccaataatgagggatctataagactgattgtaaacattaaattaaatgataaggatacatgtctggcatggcattagaaatgtagtaaattcttgctaatcatggttatataaacatgccagagatgattcaaattacactgacagcaagggctgcctggtctttcaggttacactgtgcttccccttctatacacagcttccctgtagctcccctctatacgcagctccaagcatgccagacctaagataattatttcactgtggttattgtgacttttaacctaacttctgttgagagaaattaaaaacaagtccttaagaattgtttgttcactggatgttagtagtgggttggcaagcactgtaattgggttttgtaggacttctctacacaaagggtggaagagccactaagcatcctctcaaagtttcaaatatattttctggcaggagttattttgttaaataattctagaggagagtttactaagtagcttattttgcaaactgtgaggctgccactcagtcactaagtgtatcattaatgtggtctaattatctgagccctcacaattccacactgcactggaggagaagtccaaagccttgaagctcactgcctcttctctcatttcagaacccagtgatagtatgcttgagaattactaaacatcaggtataaggagtcagagatgctgaacagaaatcacatgattaccattattattttatatgatttttgcagattttgagacatatttgttcatatttaacccttaaatacctctgagccattctttaacacagaatgactgatatttttcaaattttcctagccaccgtaataatgaatacccttctagttacttgggtgaaacatccaagatccatttttgcctgccttctgaacttcattccttacttttattatgttgtaatatcctgccagtttcatgtctgtcaactcctccctatgctcgcagtcgtagtccatctagtcattctccactcagatggttgtcatggtcccaaagggtcttctctttctagcctcccactctctaatgagtctttgaaattgccttcagagttactttcctaaaatatgcacatctgcagtgtacttatttggcatagaaactggctactttgaatttaatacattaactcaaatcctatgttgtcgataataattatttaggacctgtttcagtttaaaaacaccggaatctcccttctaataaacatgggtgcctttatatgtttttaaaagacattgcatactgtctagagtaacataataaatttttaggtacaacatatatttttgatgacatttgaaaggaaatattatgtgggtggaatagggaaatagtaagttatctaggaaatgaaaacagtaaattatttaacacagcctaacagtgctataactgtaaataacactttagttctgaagttaaaggtcagtgttcagaatgaaggcagacaaaatagatattcccatggcagaactgttctttatggactttcaggaaactctaaatgacattctctgccaataatgactctgggaaattgcatctccttgttttctgaatttattaatacttctatctccaagtcttcctggaaatcatattttaatcttttttttttctgtttttttttcctatccctgccacatgtgttagcaaaactcggattgttttctcttacataacactaatcattcagtatcctccattattttagttgttagggtcatttttgtttttagtataccagaactttgtcttaagaaagaaataattgtgttgatggacttgatggcacaaaacaggagttttttaagtgggaatggaaaatagtttttattttgaatgttgttctgacttgaggtggaatactatattaagagggactctgaggctctgagttcagtgggaaagagggaagtgagaattcatcatgtctgagtgggacatctagttgtaaagggggttgtgtcccagggtttcaagtatgaacactgtaatgagaggtttgaacctagaaccacctgattacaaagcttacatcctttaatagctagtctggattacccctcataaaaatttgcaaatggtcaggaaagtgtgttataatttacaacacttttccacttgaagtattttagrcaggactagggaacaatgtaaggatgtaaaagtggaggtggtagagatggggtttatctcttttcttcttaaataataatcttggaattatgaatctgtatgcacgaatcttgaataagcatcaaaatctttctaaaactttcacagtgcaatgctgtgggttgcattgtgtccttttccccccaacccgaattgatatgttgaagttctaatcccttatgtgatggtatttggtgaaggggcctttggcaggcagttaggtgtagatgaggtcgagagagtgggccctcgtaatgggattagtgtgtttataagaagagacaccagagagcttgaactctctttccatgtcctcacatgtgaggacacagtaagaaggtgtctgtctgtaatccaaggagcaagccgtcattagacaccatccatgctgccacctagatcttggatttcaagtctccagaactgcgaaacaataaatttctgtgttttaagccacccagtctacaatattttgttattacagcttgagctgacatgcccattcccaggttttaccctggagattgattcaacagttctggagaccagcctagcatttgaactcttcagaatctccatacgattttgtaacgtactcttagggtagagcgcaaccaaatttttaatttgtctacaagtggttttcagccttttctgcacattaaaatctttggagcttttaactatgattgattgagaggccccatccgtgatcaattaaatccggggtaaggtcaggtactggtgttttttaaagagctccccaggtgagtctaacatgtagccaagcaaaaggaagaaccactggcctgaatttatcccttttcctctgttcttctgctccataaatcctagtttctagaaatacggagtccaatcatgctctctcttcccctctgggttccccttacatctcagagtgccattgctattattttctgaacagcaaatccatagtttcaaaaaccatcttttttctgttgcctcaagttttccagtactttaaatctcagaatgaggactgtaaaagtaagaaagtaaattgattttctaggatgtttggattctgggcaaattggtgttatttatttaaaactccacatttcaaagatgtaatgggttttagattttataccaaaacaatatttgatatatgatgcctttctaaaggttatctttctgatttttttcccaaaatatatttattgaatacttttttgtaatccctccyagctactgtgttggcactcaggatgtaaatgaaatggtaacatttagaatattttttaaccagcgtggcattgacgcgattggtcagaaagaacattgattgtaarccaccctatggtcatcctggtgcattttggctctgaatttaataccaaaagaggcagctacatccccaccctcttaaggcttatggttccttgtaaagtcttgtatttgaatgtatgttgacatgacctagatcatttttggatactaccctagagtatctgatacagtggatcagagttggggctcagtaatctgcattttcaacatgtttcctaggacactggataggaaaagacaaccaggaagggattactcagttgttccataaagcaattcccattgtcttcagtaaactctagccaactacttgcatattccttttatttctttcagggtgttttctgtggaaaatctctacggtctgatagttggcatcctggcagttaattttatggagagttagcttttgtacattcctacaacatcggctcctcctttccctcccactgcaaaccccagtcagtaggagattctagaaacttgaagagagataccactttgtttttcttcctaaaggtgcaactatttagttggatgtaaaatcctacactcttcagttgttaaatctgtctctgaatctagtcatccctcaggggttttattaatctaaatgaccamcattatcacagctgcaactcatcttaagaactatttctcagaaaaaaacagtaagtagctagtgactctgtacacagagaaaaaaataaagaacagtttaaatcatatcagggtttcttctgaaatttttttcagtgttggaatgtgtaacttttaatctcattttggggaattttaaaatttggtttggattaaagagcaaaatgttggaaaagtaaacagcttattatctaaaggcattaaatatctaaaggcattaaatgtctaaagatattaaagaatgcatactttcagattcacctttttaaatacattgaaatttttattcaccawcatggtaaatcttttaaatctgttygaattaacatattgtaaatgatactcaatatatacatattgtatgtgattttatatgcagtaagttataagacccatggctttttgaacaattgataatgaacatttaaaatggtaagatagatcttagaaatggtatctgatttcctcttacttctagtgagttgtgtcattgaatgttttagataaaatctttgaattatgaatattatgcacatgaaagagtatatataatattggtacagtttaaagaatagcaaacattggtgcatattagcctcaaatttaacactgaaagagacatgtatctccctaccctcttaaaacttacagtcccttgtcgagtcatatttgaatgtatgttgacaagacctacgtcattcttgaataccagccccagagaatctaattcagtagattagagttggagctcaggaatctgtattttcaacatgtttcctggtagactggattggaagagacaactaggaagggattactcggttgtcctataaagtaattcagtgtgtcttcaacaaacactagccaactcgatgcattttcccgttactgctttcagagtgttctactattcagcttaagaaataaaacattatcagtgactacagtttcctgagtgctctaccctgatcccatacttctctcttccttatacagttaacctgtagcatgagttttaagaaaatcattccatagcatggatctcttaaaaatagaattatatatatatatgtttatttttgtctatttttgaacgcgttagaatcatactgtgtttmttctttgactcatttttttcattcaggtttgtttttgagattcaaccgtgttgatatgtataattatagttcattcattttcccactatatattaatgcattatacgaaggtcctataacattgatccattctagtattgatgggtttttggattgttttcaatacttttttgaatattatcaacaatatgaataaaattatatgtggcttttagtgcacatgtacaagtatttctctaaggcatatacctgggagttaaattgttaggttaaatatggtatgtgcttgttcagctttcctaaatagaatcaaagtayactccaaagtgattgtagcaatatacactctccccggcagggtgggtgaattctagttgtcctatataccgacaaatatgatgggtgtaaaatgaaatttactgtggttttaatttttatgtctatgatgaataatgatgttgaagctctttttatatatttaggagtcattcttgaaatgcctttgtttttgttcactttattattgttggtttgtcttcgtattatttcataagattcctttacatattttcgatatgtgtcttttgtcgtctagatatattgtgagtgttttctcgtaggatttttctcaaattttcactctctttaaagtgatttttaggacaaaaattatctttcaattttaatgtatgtggattagttttctctggcatctataacaaattaccgcaaactcagtggcttaaaacaacacacatttattctctttcagttctggaaggtcataagcacgaagtcagtttcactgggccaagatcaaggtttcagcagaggcttgctttctcaggagactccaggggaaaattcttttcctttccttttccaccttctagagcttcattccttgcattccttggctcctggcctcttcctccatcttcaaaggcagcagtttagcatcttgtttccatcttcacattgcctcgactgctgctgtccttaaagtttcctctgcttctttcttctgtggacactggggattatatttaggctccattcagataatcgggggaatctccctatctcaaaatccttaatttagtctcatccgcaaattcccttttgccctataaaataactttgacaggttcagggattagaatgtggctatctttgggggccattattcatcctaacatagaagataaatttatctttttttttattttggtggagatggtagtgagacagtgctgtgactgttgaatcttcagaggccagattagcccaattttgtaagtagtctctttaggtcactgttgatcaaaaatgagtgaccaaatacttctgccacttaaagatgggggaatatttctttttccttaacatctatcacttataccaaatgtaggagaggaaaaaatgtgtgtgaktgtgtgtgtgtgtgtgtgtgtgtgtgtgtgtgtgtgtgtatgttccttcttttaaaattcctgagctcctctctttcctcccatgttaaaatcggtagcatgtccaagcctctgggcctactgccttcggttagctcacacttgctttttcatgtgaagtttgttctatggcataatcttagtaaagcgttttwaaaacaaaaagatacggaggctttttacaaccccttcgcctaattatatgattcattaaaagaatcttgggggtgggcatggtggtgactcatgcctgtcatcccagcactttgggaggacgaggccagcagatcacttgaggtcaggggtttgagaccagcctggccaacgtggtgaaaccccatctctaccaaaaaatacaaaaattagccagacatgttggcacatgcctgtggtccyagctactcgagaggctgaagtaggaggattgattgaacctcggaggcagaggttgcagtgagccgagatgatgccagtgcacttcagcctgggtgacacaccatacacacacacacacacatacacaatcttggtatgtaatgaacagagaaaatgctttcagttttgttttgtgcatctggaaagaaaatgggattcaaatgggctgaagaaacaggccgtacccctaagaaagaaagaaactgagaggcagatattcttggaacttttggtgcagaatgccagaagctagataagcaccccaagtagaaaccagaggaaagtgactgggggcgagaagccataagcacaagaattgtttaaatgcttcagtttgcattttagttcatgctacaagttatgtagttcatgctacaagtttatgcctggagcttaaaatcaggcatttttctctatctaaatttctttgctttaaccattgcattttaaataatttactctcctttcttttgagatataaaagaaagattttgttcttgcttttattcttattttgaggattgtggcaacatgtagaaaaacaggagtagagcattgctattattgacaaaatactaatgttacgaagttattgacctataatgtccttagactgggaaaaatcaatgccttggtaatatctatgccaagtggcaaaaaggagacatcagatatttatgttgttctacataatatttgattttatgatatttgagttttgcgggatatatttgatggatgttatgatcttaataagtagagattgtcaactcttctgtgaatggcatataaaaaatgataagagaatgtcaacggacatttaaagaaaccgaataactgagtaaaataagtaattcaatacttctgccttaaagatgggaacttaaaatttcatatagttagtgtgtcttgattattgcctattccatcttgtggcatcatacaccctgtaaatctacagcaggagaatacagttggcattggagaggaactggtttcatatgattatctaaattatccaagaagaatggactatgaatcccttgaacatatgcttgagtccacagggattcaaaccaacgcctggggtttagatggaaaggccttgcccaaagagcaaaaagatatgacaacaaaattataacccttggcaaattccatcaaattgatttgaatccgtgggctgaaaatgtcagtgcttattaaagtatacattgaaaattattaagaatatgattgctgaatgtcccatattcttttgtgtcattaacaataaagtggcagctgagcatttgtcttgtctaacaggattactgttggctatgaattaaaaaacagaacgtggaggaattgccttgttaactactaatactatttcgtggtttagtatagatgggttaatcctcattctatctacttttatatactcactgctaagccatattttgaggctgtttctctaacagatgcacagggagcactttcttattgctagagtacaaaaaaggaaagacatgtttgtgatgttttcaagaacttcagtgtccgttgcatatataaccttttgaaacaaagaaatcctatgcatttgactaagattgcctgtgaaatctggcgctgctaaaagaaaaatatgagataatattttaccataagtacttctttttcctattaaaaaatatcacagcaaaaacaaacactatgtgccagcaaatttatgcccctaattatcctgagaattatcatgcagtttgcaaggaagaaggggctctagctttccagttgctgatcggcaataatgaacccctgctctgttgttaaatactttttttttggtagagtcataaagaacagcacttctagcaaagatgcaaaatgttaaggccgtaagtcaaaggaataattcgatatctggcttgataaacggatttttaaaaataaccttgatttctgctaaaatcttttcccttgaacataaaagggagtgaaggatttgtatatttcaaggtaattaaaacattactgatttaaaggaatactatcatgtataagacgaagaaaactagaaagatttctttttctctgtcatccagtatgttagccttgagagtgagacccttaaagcagcaacagagtgagactttttgaaaacgccatagcaacctggcctcgtagcccatgcctttctttagaacaacaaagaatggtgcttgaaaagtcttctcatgattcttctgcttcaacagcttgcctttctccttgtcaccagagtaagccattccttccagatcgcatcttctgccagaagccacaagtttggcttcttgaaatctcagaagtactcattcctcaagtaattaattaaaacaaataaataaaatgtgtaaggctttaagcttctgcaggaggctcatattcttccaaaatagtctgtcaacaattacagtatttataataataattgtgagagaaggataattagctttaggaattcttcttcatctagatttttataaagtgttcttaggaatagggatggtttattcctattgacagcttgtcccatgtaggggagtcatgtttgaaggcaacataccagattggaaggagcaatgattcaaaacaggatactgaggaaataaacatactgatatagtatatagttgtaatagctgcagttgtaatcaggcatacataacctaggcagccatttacattttatacaccctcattagagcgagcttctggaaacacattagtcatattatataattaataagtactggatccagagccaataggctgagcaatacacacctgccttcagtgagcccctgatgacacttattctttttgtttttcttgtattttcagtacctacctagcacactgcttgacattcaataaagactcaataaatattggatgtattaaacaagattaaaaactgcctgtaaacgtaatggtgtaaatgtttactgtaaatgtaaacttttccaggaaataatgcttttcgtccacctgttttgaaatataattaaaatgacattttccttttcataatcaggacaagtgttaatattacaaaatccttattaagtcaggacaatgtcaatattttatgggctgtatttcaacattattaattctaatgtaaaatagtcactctttgactataaatctcaaatcatttccaggtcaaaattttggcacatttttttgcctagatttttggatagttgaaatgtctaccagccttctgaattttctcatgcatttttctcactgtcctgattaaagagcagaaaataattacactaattttaaaatatatactttgtgacatttttcaacatttattaaaacccacattttattatggccaggcttcttatctctacttttgcttagaaaaatgacagttagtttggaattcatttttgatttttcaggtagtgttgctgtatttctcaagaataatggttgagttatggtatcgaatacttctaaatattcatccttgttgaaaaggttttagtcattcccttaaaaggttaatagacattgaaaaacactgaataattcatttttatgtacataagctgtatcaaatgtagtgtagtctacaaggtaacatcagggctaaagtttcattccagtggggactgatggactgctctctttttgtgggtataacgtgattgtactagtaagcccaggggactttacaccactcctccttgatcagtcctgaagttcatgtattacctttttacctaaatttctttcagtgttttcttctctgctatcccttgagtatatctcttgagcttatcatgtgtcttggttgttgagggccagaactgaagaactgtccctatcccttcttgtgagttaaaagggaattaaggaaaaggaatctcactgcagaagaatgttttggttgttcatcctatatttaatcttgctcctttragtttatggtcaaacatgagcacatttataaaatgctttcctggggcagcgtggaagaaactgtgtttggaaagtgatattacactgaggacacttgggcaagaggcttctgcagcttcagtcgccattgctttgaagatcatcactcattgctcgaaatcttctatgaactcctgtaagttcagatgttaatagctgaacattgttcaacaaagtcttaaattgattttaaatggactggtatagcaaagcaattggaaggtatacaaaagagcaaaattgagaagctgggtgatctaagcctgaagtcctcaaatatttaaaagacttagtttgtcaagatttaaccatctttttctgrgttcttttcatcactgttgacaaaagcaagcactggagaaaaatttttcttttgcctatggggccagcagtgaagatgagctcatctgtccatcaagctcttgctgctgctacctggcctcatttaatagctgtgaggccaaatccttactgtctttgaagtcagaacatgcaaagtttgagtatttgatgtatctttgagatgtgtcagtggccaaccaatgagagggatttggcagttagtgtcaatgctacaaaagacagttaattgtacgaaaaccacaggataaaactccaagtcaaaacaatagaacatcatccaggttatatattttttagctatgtagcaggggccctctgcattcagggcttttaaacttatttccattaacatctttatcatttacatagtaaagctttcagaatataaaaattcttctgattatggacaagctactgtgtgtccaaagcattgtataatttaacatgatcaactactttttctaaaaatgttatttctcaaagaaataaaatatagcatttgcaaaacacacacacagaggatcttattattgaagaaatgcctaggttatttgcaagtctattaggaataattttccttaacttattgactgttttcatctcatggaaagaagtttccctcctgtctttgctttggattatgtaactttgatttttcttaaagtaatgatttgcctagaagtgaattcattcagcttaaaaaccatagtagggcagtgtgaaaggaaaatttatgaataactttttccactatcttttcacaaagataagttctagtgggagaagctctcaaagtaaccaaacaaaactagcattgacagtgaaggcagaacgccattcaggttctgaaatgaaaccataggagaaattgtcttcattgacttgaccttaactaacttgctagcgttaaccagtgctctggagtctttctgttaaaaataccaactgatgttcatcaattgtggtggttacctggccagtttatgccacttttccttagtgttgtaattgcagaatttaattaaaaattatataaaccactgaaatataagccaaaaatattgttgttgtttctatgaaaacttgattgaatgctttctttgaaagacttgatgaaggcaaagtagatacagcatatatgttaactgaggtgtagatgaaataattagggactgtgggtaaaactgtaatcaaataactgtgcagcattacagatgtttaaattacctttcttctaaaggtgacatgaaatagagagtaggagacctaaaccttgcaggattttagcccttcatagaaagattggtgaatgaatgtctgaataatgaatgtttcaagttgaaactgaatatttattatatgctcatttaattattaaacatgattatttgctttatgtggctctttcaactgtatttactgacgttgttgttgttgttgttattaactagtcctagtcatttggataagaagactcttgccctattagatcaatccctaatcataactggggtactataggacctactctttgttagctacatatagagtaacacaatgaaacagccagcaaaaataagtaaaggaagcattttaatatttatgtatttttaagaacattgacatgaatcccatttattgcttagagcatctcttcacaaatcccccaaactctacagattttcggcttcaacaatttattcagattctccacgtaagtgacttgggaaatagatttttttttttttttttttttttttttttgagnnnnnnnnnnnnnnnnnnnncgcctcccgtgttcacgccgctttcctgcctcagcctcccgagtagctgggactacaggcgcccgccaccacgcccagctaattttttgtattttttgtagagacgggatttcaccgtgttagccaggatggtctcgatctcctgacctcgtgatccacctgcctcggcctcccaaagtgctaggattacaggcgtgagccaccacgctcagcgagaaatagatatttttaacaaggtccccaagtaattttctctaacaagtacagaaagcacaagattatttctccctgttgttttgactcgtgtgattacataattgatcatttaactaagaaatgaaaagtattttagtgactaaaagtattcattgcacacatgtatttttttttctgtaaaaaaaaaaaacctgatgtagaagaatgtttctaagccatataggaacacaaatatttttgttccagaataacttaccagaaggccatggcatagagaaattccctcatttctataagtgtgcttttctcttgaatgagctttacttcagtgttttacttgggcacatgtagggaaagaaaaaaatcatgttcaagttgaggaataagaagagtttcagatgaagagaagcagattctggcacacaaagttgaacagtgcaaaacattgaagcccagctatacataatcaagctggctaagctataatacacattaaaataaaagtttttttctcaatggacaaaattggaactaagtatgtctgactgttttagagataagcacttctcaacttctaacataaaaagagaagctggtgtttatgtgaaagaatctatgtaaaagccatatggaactgtctctaataaatatccatttaatcaaatgtcactatgtttttgaatgttttgtagtttgatgcagagaatgtacttttatttcttcagcagctgctctttttaaatggatgcagctgtactacagatttaatttgcaacaattgcttaatttttagttggttgcttctagtctttcaaaagcaatgtttcatgtttctgtggaaagatttttttcctagaaagtgcaaagtacgatatgacgtaggaattaggcaaataaaagtttctgcttgatttttttaaaacataaaagttgtatttcctctctttatagcactgcttttcctagacatccttttttcagacaacattactaaggagatttgatgcctacatatcagtcttcatctcaaaacttctaaaagaggccttacgcggtagctcactcctgtaatcycagcactttgggaggccgaggtgggcggatcgcgaggtcaggatatcgggaccatcctggccaaaatgttgaagccccgtctctactaaaaatacaaaaattagctgggcgtggtggtgggcgcctgtagttccagctaccggggaggctgagccaggagaattgtttgaaccccggaggcggaggttgcagtgagccgagatcgcaccactgcactccagcctgttgacatagcgacactccatctcaacaaaaacaaaaaacaaacaaacttctaaaagattgtaagctgtaacaaattctggcaartgacttgcaaatgagaagaaaaaaatcacgctcattcatgtaaaatggtatctgctttgagaataacccagtatcaagtatgtgttacttgaattagaactttgactttttaatatagagagatacttttatctttgacgtattttattaaaatgtaaagcacatgatgttcctttcctatttccttatattactctgtttttactgtaatgtttagaaatctactttctagtttaattgttatggagaaatcatcttcctgtatagattaaaattcaatcttttttgaactcaaagaaaaatttggaggsaaagataaatattaatgatggattatctaatatttgttccaatctcaacatgttttacttctcatagccttttatcttccagataaaattatgagcgcagatgtatagacatttaaaatgtgattttaaaaatgtataatgcttttaactttcctcatgtaagacttgtctatagggctctggatgtgtgagcaggctgcctggaacctcctagcctgctggttcctttactcctcccatatccaactgactcatagcttagtgaacagttttttgtttttgttttttctttaaattttgccttctttctggagtattttcaaaaatctccttgtgtatatattggaatatttttagctgttacctaagtacttaatttctttatatagtaggtcatgcagacagaattctgcaatacatacaaatttgtatctcccctcctcaaactagtccctctgagttaaacaaagtagttactataatttccttgggatttttatctcttaaaagtatgctatgcttagtggtatgtatataattcagtaatagtctgttttaatttttatataaggtttttctttaatattttaactgttgcttattaaataaaacccatttgtaataaaaacagagttaagtataatcagtgttcccccaaatcaacgtatctctcttgtacaatttctcatcatattgggtaagggaaaatgtgatttttggcgtatctgtgatttctgaaggaaaggggtttctctgtagaacacaatgtgcttattctttttcactttaacactggtatctattaatggctaatgagctccattaggtttaatcaacatttcagcaatttttgacttgaattttgtttaaactttctgctttgtcttttaccttttgttctttattaygttagctcatttaatttttatacgtaggataaaacatacactttgaaatggcctcagaatttgaaagtatggctgtaaagggtgaaatcactgatgttaagggaacataactaataatggtcattgacgtacggatgactagaaaggccagttgtaattcgtgtttaaaaaattactatatcatcttcaaagatttatttatttatttttgttccttttcttggtgtggtttgtgtgttgatgggtggtgaatttggaggaaagaaatgagtcttgagaaaataccttggtcattcattcttaatatgtttagagaatagcaaactttcagcatattttattgagatcaaaagtagcatgtgaaattagacaatgaaatgtcaatttttgtattagtttcctggggctgttgtcacaaagtaccaaaaactgtgctgcttaaacaataggaatgcattgtcccacagttctggaggctgcaagtcgaagatcaaggtgtcagcaagttggttctttctgagggctgcgagggaaaatctattctgtgcctctctcctagcttttggggactcaagcattccttggcttgtaatggcattcttcccatgcctctttttatatgtctgtctctgaatccaaatttcttttttataaagacacagacatattggattggaacctagcctaatgactccaacttgatcatcagcaatgaccctattttcaaataaggtcatgtttattcacactgaggattagaactgcaaatatgtttttttttaggggggacacaattcaacccataagaattctgaaactttgttttgtccttttttgattagtgttaatacattttcagagtactttatattctcagggcttagaataagacaaagtaagattattcattcgagtatactgggttatttagtaagaaaatggactgagatttcataatgaactctctgctgatattgacatgaaaactagcacattttaaggattcacctatctacatttacatgaaatcaatgttcttataaccttctgacatttacttacctttttgtatttacttatatacttaattttgcttttaagtattattactatctttaatgcatttgtgctcttttttaatatggcaggctatggagtacaaagatttgtgtttttctggattagcaaaaaataaaacaaaactgtaaatccaatcattcagatgagttctttggaacaactgaggagtctgtggcctgaccaacaagactaaggaccttacttcactactatttggatgccacggcttgaggttttgttaatattttagtgtttctcctaataaaatccaagggatagttgttcttttagagcacatttataaattcttattttagcctatcgctgatagacctttaaaaatatattgccttgacatttatattgatagagcatatattagtctgttttcacactgctataaagaactgcctgagactgggtaatttataaaggaaagagctgtaattggctcacagttctacatggctggggaggcctcgggaaacttacaatcatggtggaaggtgaaggggaagcaatgcaccttcttcgcaaggtggcaggaaggagaatgaacacaggaggaactgcctaacactttaaaaccatcagatctcttgagaactcactatcatgagaatagcatggggaagccatccccatgattcaattacatccacttggtgtctcccttgacacatcggaatcatggggattacaattcaagatgagattttgagtggggacacagccaaaccatatcagagggatacattcattaagattaacaattcttacttcccagtgtatatgttcctcatgtttttaaaaaggaaaatatgatagatgtggtgatttagaaactggctgcttctatgtggttcacctaatccaagatttttgcttatttgtttgtttttttgagacagagtcttgctctgtcacctgtgctggagtgcagtggtgcaatctcaatccactgcaacccccgccttccaggttcaagcaattctcatgcgtcagcctcccaggtagctgggattacaggcatgtgccaccacatctggctagtttttgtatttttagtagagatggggtttcaccctgttggccaggctggtctccagcttctggcctcaagtgacctgcctgccttggcctcccaaagtgttgggattacaggcatgagtcaccacgcttggcttaatcacagatattaaaatcacatgtttgtttgagagttagagatacgtgtagagactttcaaagcattacttgaatttttttcatagttttttaaaactttgtttctaattattgaaataatcaatgcttactgaacaaatyttaaaaaataaagagaagtatgtgaagagaagtacttaaaatccaagcataatataatattaaatttgactggcgtagtgtctatctgtgagtgtgtgttcacatgcctatgtgtagaactaaagaataatttaaataaattatgacttatacaaatrtgaatgaatgtatgcccaaaattccatttaactgattgattaatgagggaaccagtaagatgttacaactgattcaaatgagaagttaaagtatcacatacatttaaagtcagraaagaagtgctaaatgaatttacaaaaaggtgcataaggctggacacggtggctcatgcctgtaatcccagcaatttgggaggctgagataggcagatcacttgaggtcaagagtttgagaccagcctggtcaacatggtgaaaccctgtctctactaaaaaaaaaaaaaaaaaaaaaaaaaaattaattccagctacttgggaggctgaggtgggggaattgcttgaacccaggaggcagaagttgtagcgagccaagattgcgccactgcactccagccygggcaacagagagagactcaggcttaagaaaaaawaaaaaataaaataaaaaaagtggtcagtttctacaaggcaatattcaattgcattccaatggatacaacatccatttctatttttgttatttttctgttagtaaatgagattgctgtcagtttctattattttcagagttgtaaaatggctcaaagacaataaaagccagagaaatgcatgagctagtcagggaacctactaatttgtcatgttttttctttttgcccattttgaagtttttcacacagtttttaatacagctcatattgatatatattctcatcagttggaattatgtttttatgtttcttcacatagagcaaatataattaaaaataaaagcataatgcatattccttcctattgacattgatactatctatagcgttacccaggagcattatgaaatgcacaacacttaaaaccaaataaaacaaaaataccctttccttgagctctttactcttggggggcaagaggggcactatattatcctttttaccttcttcctcccagtcaacctctctctttttcacgtactctaccaacatccccacccaatctccccttatgcctccaaaattagtcctatcctgattgtggagtttggggttttctttgattcaatggatgataccagtcacaccatttgaaaaaagcatatgacagtgttgttcagtgttggtgaacaggaattcttgatatttatttttaaggattccawttaattgctaattacagatctttgttaaattaagccgaccttcactcacatttaaaaaatttaactttgttttggttttcatgagacaaatatctctctttaagtgaacaagcttttaaaagaattagcttcttcagtatggaaagcaagatgcaattcgcagctggtgcaatggcttacaccagtatgtaatcccagcactatgggaggccgagggggaagaatcccttgaacccaggagttcaagcccgggctgagtgacacagtgagacatctttacaacaacaacaacaaaaacaaaataacaataacaacaaataattacctcagcctctcgagtatactgtaggtacaaagccaccacgtgtacctgtagtcccagctactcgagaggctgaatagagggattgcttgagcctgggaggttgaggctgccgtgagctgtaattgcaccactatactgcagtctgggcaagagtgagtccctgtctccaaaaaaaaaaaaaaaagagaaaaagaagcagttcccctaatgattctggatcattatgccagaagtatccaggttcaaagcgatattttatattttagtaagtagttttcactaataattcttcagcaatcaacgaataattcttctggaatacatcaattgtttgagaatcataaaagagatttccaaataccgtactccaaaatcagtaacacactctgaatctgaattgggctatgtaaatgtcttcagtttacagttaagtatagatttttacttgcagttattttctcttagtcatttctttccttcattaaggacttcgtattttattttcatttgcgtgcatggacaagagaatggatgcattcattttgttgtttctagagatgaatacagaaaatgcctagtgaagactgagtctggctgtgatttacaaagttggagcgttatagccagtaagcctgtcaggcagcccctgacagcagaagcaagtcttgaggtgggcatgagaaatgacagccttctttatgccagagtcttattaccattttgatttaaaaaacattgttttgggtctcagtaaactattgtagccatgaaaatgagataaaataactatttggtttgtcctatgtatattctatatatgaaaggaagaaaaatcagtacatggctatcagtctctacagaggaggggaaataatttgtgcttagatatattaatgcctaactgatgttttatatatgtgatcataagatatgtcatttacttaaaatttatagttaatccccttttttgcctcacctacagacaaaatggctttattccagcaaaattaagtcagaaaataatgttcactgatttagatgttgatgacagatgggtcttaggtcaggataacagctatggctgggagacattgattgttaacatttatgccccaataatgaatgacctgaatttttcccacatgtttgctcaggaaacacagggctgtggaggtcttgacgtcatagaggcagaaggatttggggccagagtatattcactgctggcagtcattcattagtaaatccttggtaagagagttggatttgagtgacatctggaggctttctatacctagagatgggggagttctgggtttgtatttttttctggtaagctagattcatcttttaggaaataccatatatataattgatgggtttaacatttcacattgagaggaggtgaaagattgaaagaattgaagaagaaagattgagtttgtatgattttttcccctgaatgaatttggttaatttagtgttaggtgctaatataaaacattgcttgagccatgtagtgtcaggaaaacatatctgttattagttcttggttgccatttaaaaatggagattgaaatttcctttacctagcaggaaaattacaacagtgatccttgaatatttggaaaggacacatacattccaaagtgtctagtgatgaggcaaaattgttcatattgaattcctttttcttgctcaaggccatttctggaggaaacttgtaatattggagaagttacatgagcacattgtgtttgctgcatggaaaggagaatataaggcttctcagcacagtggctaagcagatcaagagttgaggttaggttagcaatcatgaggctgaggtgcaacttagactccagtcccctataaaatataccttatagagtttagagatttgatgcaattcaaagcaaatttactatrttgaacatcagcaatgtcccaaagaagaccataaaattctgtggtggttaaaatctgttgtttaaacattagaagtataatattaaacatttctttctgttggttctcgtcccattagaagagctagatcctaatagctctttggtaccttatcaaaacaggagaaacaataatttaatgatcctttaatccaggggtggtggctcatacctgtgatttcagttatttgggaggcccaggatcacttgaggccggggagtttgagaccagtctgggcaacatagtgagaccccgtctgtaccaaataaaaattagccagatatgacggtatgtgcctgtagtcctagctactcaggaggctgaggcaggaggattacttgagcccaggagtttgaggcccactgtaatctagcctgggaaacagagtgagcctgactcaaaaaaatcctttaatacttttctattcaagaatttttcttttcagtccaagaagatcaatatgttaccaacaaagcaatttcccatcaaaatggcatctttgccgattcagtgccacaaaaccaatacccaaaccgaaagtgaacatctagcagtgcaggctttattgatggcatgggattgagaagctcaagagagctgggaagtcacagaaacaggcatctctaatgaaagggttgggtattaaaaataaggggacgaacattcgtgttttcttctgggaacgggcagagaactcctcaaaaccagagtgctgccttccctcccccaccttttgtttcaatgggttgttgtcatggtgattgtaaactgtcatggtgctgtgaggtgtatcatttagcatgaaaattagattataatgaagttagagtttcttcagaggtcaagaaagctgccatcttggatcccgctagtcttggccagtttggtcactagggggacttttgacctcaggtgtcccatttttaaagataaacagagttaaggaaggatagaaattcacctatgtcatgtaggcatcatactgggtaacaaacctgcaacacattgtctagacctctgtgttagagaatgattattcatactttatggaaagaccttgtagttaagattgtcaagtaatatttaactacaaagtggattgtctgccttagctaggttactctaccggtataatcgaatctctttacagtagtagttagtagtagtaagtagtgtccaatgttactgcgtttttgtttgagaaataataaaattcaaatgttgtagaactataaaatatacagatttaaattccctgttgtaatcttacttcccagagaaaattcctgacgataatttagtacagagagtttttttttgaggcagagtctcgccgtgttgcccaggctggagtgtagtggtgcgatctcagctcactgcaacctccatctcccacgttgaagctattcttatgcctcagccttctgagtagctgggattacacgtgtgcatcaccacgtccagccaattcttgtgtttttagtagagatggggtttcaccacgttgtccaagctggtctcaaactccttacctcaagtgatcctcctcccacctcgccctcacaaagtgctgggattacaagtgtgagccactgcagcagtcctagtagtctttcaatactaaaatgacacatagaccagcatagtgggggaggcaggaagtattgcagggtgagtagaagcacagcacagcctctggagccacagtgtctgggttcgaatcctgtctgctattgtatgagtcacagtctgggcaggaaatagatgactcaggggtcattgaagactttgaggaagtacctagttatagaagtattaagaaaagcaacaaggaatgatgaggcaacctgggtgcccaaaaagtgaaagtggttatcactaggaccaaaggcacgaggagagggaggtgtaactgagacccagtgagagcagtrcctgtgggaaaggggctactgaacaggagctgtggctatgggtagagaaatgcagccactattggattacgctgctgcactgagcaggtgggggcagggcagcgaggggtgattataaatactcacctcaacctcctttcttttattccacactcactgatggttactgtcatgggctgaatcctaacaagatccatggactccagaatccaggtgttgtaatttgtaaaatcagcctctttagggcagaggaaaaggaaggagatgagtaagggtggggtggtggtggcgggaataaagacttacaagcaaaaagcaaaaacacttactagctgtgtttgctagcaaggcactgtgtttcctagtaactctgtgctttattttccttattgatttaaagaggagaataatagaaccaataatatagggttattatgagagttaaataagttaatatgtatgaaatgtgtaggtgagtaccacctgtatagaaattagtcagcaaatattgtcaatagtatcattaacactttatagattaattcatttatgaattatgaattaattttacatgcaccttttagctgtttctgatttttacttagcagtgtatcttgatcacctccttctctgtctgtatatgtacatatacatatatggacagtcagccctctgtatctgtgtgttctgcctttgtggattcaaccaattgtgaatagaaaatattagaaaaaataacagtacaacaataaaataatataaataaaaatagaacttacatagcatttacattatattatgtattttaagtaatccagagatgatttaaagcatatgaaaggatgtgtataggttatgtgcacatactatgctatttatctatgagggtcctagagcaaattcccctgagataccaagggttgactatatgtacatatacagacacacaaacacacacagatgtgcctcacttctctctctctccacacattcacactcacacccattcacaaactacttttcttttttttttgaggtggagttttgctcttgttgccaaggctgcagtacaatggcgcaacctaagctcaccgcagcctccgactcccaggttcaagcaattctactgcctcagcctaccaagtagctgggactacaggcatgcgccaccaagcccagctaattttgtatttttagtagagacagggtttctccatgttggtcaggctggtctcgaactcctgacctcaggtgatccgcctgcctcgacctcccaaagtgttgggattacaggcgtgagccagcacgcctggccgcaaactacttttcaatggcttcagagtattccaatgtatggatataccagaatacacttaaacctttctgtttacaaggggattcagactattttcagtattttaccattatgcacaatgctgtagtaacatttgaacttctaacctctaattttggattcaagtgaagcaagtgagttttgtgtattttgagtcatctagattaagttgtcttcaggccgctctctgatgagaaggaatgtaaatgagtgacattagtacaaatattcaagtggctgaagccttttatttttcttggtcctaacccaattcaattttatagagaaaaagtttatagagtttttacatgacctttaactttattgaagaagagcttttaaaatattttcttgataccaccatatgccctgcacttaggtttcatattgtttatgaaaatattgatagctgtgtaatcaaattcagggccaaatattttcagtgtttgattttattgtaatgtggtcagagaaacataattataggtgagtgacttgaaactcatgctgtgtgtaggtacatttcttaacagaataatgtatctcgtgagtgttatgtatgtgtgtctctgtgtgtgtttgtgtgtctctgtgttgtgtgtgtgtatagttttgtcctcaaacttatttctccttacatgataaattatgactttcctttcctatggaataaatgttaccagttcaagttgaccaagtgtgaaaacaagtgacatttatttcctgctttcctacttctgggcagaattggagtggaaagtaatacatgtcgttctgcactgaaatatttaggactattttgccctgtagtagacaatttaggcttaataaaaaggtttccatccagtgtttgctaaaggtaattgaagagaattggagaaaataatattttaaacaattccgcaaaaaaaaaaaaaatacataaatagaagccstatgttttgatggcattgatggcagtctgttctaaattcagtacaactgtgtttcatcagataagttacttagcacaaatgtgattcatgtaaagaaaccgattctgaatcattatttatttatttaaacatagtgtctgtctaaaatcattcaatttgagaattcttccatatggacagtggacaagagaatgttccatgaatttttatatactctcctttgccctaagtctgcctgtttgaaatgtgttcaatcaatgcctgcttggagttctgctatcctcttctttcctctcctgttttcttgaccattcttcttgtggtcaccaatacaagttctgttcatctagttgtctgggctctggcttgaacctttattgctggcacttagcataacagctaaatacttaaaatgctttcattataccagattttggatttctttaatttgtgaccacaagctcagtgttttgaaaggtagaatcatacaaagaaacaactataatctaattaacctaagataagtagttaatgttttatgtgtcttcatcattttatatattttacatagaacaatatacttaattttgaatattccttttaaacttgtctgtttcacaggcatttttttctgtattaagttttcaaaaacatttttaatggtcatgtgccaatttttttctatggctattacataacattctctcttgttagacatttttgttgttttcgacttttccctactrcaattaataatgacatgaaaagttttgtataaaacacttcaagttgcagaacatctctttacagaatattcctagaagtggaattattaggccaaatggtaggaatacttttaagctttctgtatatgttgccagattgctttttaagaaggttgtaccaatttacactcccactagcaatgtaggagagtgcctggtaactttttaattggatttctttgataagaaactaaatggacaacatttaactgttcatcaaaaagagagaggagtttgttgaatttctgttattgcactaaaggaattctacatgttaaaataaatcatttaatttttattctcattgtcatcagactataataatactgaatttgattcacatttccccctctttcgtactcttaatgtcagtacaaataagcaaaggttacagaatactgtgagaaatggtgagaaatgggagctgattctgtgctacttactcaagaaatcatgtgctgttctgtgcacactatctgtctcatcagtaaggaggaaagagatagatgagtgcctgataccaattaagtattccatatgtttgatgtgtggatgcataaatgaagtgatgaagtgataagctcaaaaacctgctattattgaaaggccagagccatcctttgccattgtggtataagtggacaagcccccttacacagatgaaaacatggttggctagttaccattatgctccttagaacttgttcaagaggacttcaggtcactgtagtagaaccacctccacaaacaaaccaacacaattctcagagatctgacgtgacagctctgattcctgatgttctcatggacctgggtactccacatcccaccccccaccgccaccccgcaacaccccgaattctctctctgctacctcatgggccaaattcttttgggatccatactaagaatttattttggctcttatcaatgagctgtccacgttccgttgttggaattcatccaaaattaagtgcctgacttcagggtttaagaagtatacttttttagattttgctttgctttgctatgttggatagaaaagatattggtactgaactttagcttctatctttcacgaatatgggctttgtgctcaaagagaaaagtcttcaaccatggctgcaggattttttaaaatataggacaaataaatatatactatatgaaagtgacagagaaagttgaacagattccagaagagtgtaatttatcttactaatgatgctcttagcagggagatgaactcaggaaacataagagaagttccatgaggacgccttgtacttgaattccacttgctgtagtatctcaaagtttcagcgttatcttgggtgtttatgttacgtgttgaagtgggcgcttattctataatggaagctatattattagatccttcttctcaaaaagccagtcaaatcgctttaatgaaaactgtaagtagttgtgctctaaagaggatgcaattatttaggaaacattctcataagatttaaaccaaaagcaacttaatgtgattctgatacaactgattaagtactttatagttgtcaatcccagaaacataacttatctcaattgaaaaatgtatataacagatagtaatttttataatttattacaattgttatatgaagtcatatttaaattataataaattatatataaactgattatttgaaatgtaatgagttcttcataatctcttaactgaatggagggctgtattctaagagtctcctctattttaatgttaacaagataaagtcttgggcaggtgtttctgctataacgtgattttaaagtttttaaaaaacataggttctacaaattgtgccctaaaaaaaaaaacaggatcatgagaaaacataataattctaaccaaaataatagtggcattagaaagatatgttagtacaaataaataaataaataactgatatagtcaatataaacctaatcatagaaaaagaaaagatgaaggtggattattcaaaagagatggaaagaagagttcagagggtggcaaatgcaaaatgcatcaaaatcaggaaaacaaacattgggtatttccaattagagactcattgatcaaatagaacaaagaagaatactgtgcaggtaaggtttatggattactctatatattactctttgccctgttctgttcarttgtgttagtatactttatgttctgctgctgtgatgactttgtgattaaacattaaccagctctcagggagtggggaggaaatcatgtaagtcaatatatcttttgctatcccactgtttaccaattgcgtatgagctaattaactatgcagaaatgtgttatagcagaaaagatttagtagtgttatacggtaggctaaaaggagtactggttagaaaaattatcaaactatatcctatcatttttccatttatccatatcaagcattttccactataatctctgttatgtaaactggtaactatacctatgttgttaaaggaaaatttaccctaatgttaaataatataaaatcccaagtctcatagattggtgggcattgtggarcttgcagattaaaatataccgcccacccccccaactgaaggaaatgtaggaactctgtatagtcagccttctgtatccctggattctacatccatggattcaaccaacctcagatggaaaatatattcaagaaaaaaagtgagtgagtgtgtctgaactgaacatgtgcagactttaaatcattattccctagacagcagactataccaactatttacatagcatttacattgaattaggtattataagttatctagagatgatttaaagtgaacgggagaatgtgcataggttatatgcaaatactataccattttatatcagggacttgagcatccctggattttggtgtctacagggtcctggaaccaatctgccatggatatcaagagatgactgtattctgtaactcttttctgtatctcagattatttcaacataagtttttttaaaaaggcgtttacttcttcaagctttgtcttacaggtagaacctatctcttactggtagaacctataaaattgaacattttttcacagataaagagtataatgatggaaatgtttcttttcctgtttttctttttctctttccttgctttctttccttccttcttcctctgcccctctgcctcagtatggatgcaaaaaggaacagcagtaaaggcaagaatgtaaagtcattgatgcctcaaattgtcatgaaagagaaggaccaatgatcatctgtatgttatactttttggtagaaaattggcatatgcatgtgtttttgcacttttggggccatggaaagtaaggattaaaaaattatatcctgtggagtctgagatgggtcctgttgtgtgctctgacatcagcaaccctgtgaccttggacaatttacttagtctaacggttctacagtttcacatttatatggtagattgaagaccatactcctgtagaattgttgggaagattataagaggaaatacttgtaaaatgcttaacgttgtgcctaaggtgcaatagtgtctcattggctactgtggacttgtttgaaattattaatctttagtcatctttgtatatcatttccatggacccttacaaaatggttagagatatgcagtgaatagagagactttcataaggatgccgattacaatttgactgtggattgtgcccgaggttgttccttgtatctgttttagaatttataataacaaaaatgaaattaacaaattgatttttatgatataacatatatttaagggtcaactgttagtattcatataattagactaatgatgcaaaaacaaacattttaaacaaacctttcttattaaccttgttcaagttaataagatccagtaataatgtcatccaagtagtgtacattttttctttctctccaccccgattctgctacctttacatatattcaattttcttgttattttattgaagtacaatttgtatgcactaatgcacaagtcttaaatgtacggttcaattagtttggccaatgtatataacctgcatatattttctcagctcatattactagttcctttattataattaacagcatgcaacacattctgagtggtaacgaaggtcaaatgtatgtggggcattttagctgtacgcttgttaatcctcacaaccccacctgtttcctactattattctaattttactgataagagctgagtttaacaagattaaatgacttgctgagggcaccagcaaagcctaccttaaaacacaagcttgggcccttaaccagcatactacactgtatctccttcactgccgaagaagcaagagtctctgccacctgtctaggtttccagagtttctttttcactctgwtgaaattcacaaaaattctcttactcaaacttattagttattgtgtattatgagaatatttaaatcaaaattggatccaagtcaatgtatagggagacatttaagagttttcctgtaagtcaagggtgttcttgaaaagagaactcagataccgtattagatatgataaagtagaatacatcaagagcaaaatattctaattcgaatttagtgcattttatcttacttggaatattattgtctattatttttaactgatggcaatacattttgatgctcaaatagcattttgtgtacattgttaaaaagaaaaagatgattatctttatactctgaagagaatacttacctatattactgaaaaacagttcataaatctaaacttagttctctaatcattttttatttagacttcaaatattttcttccatgtgatatcctttaaaatgttttcttttctttcttcaggattttttttctatgtttgttatttgggtcattcttcagccaagttgctaagcagaaatctgtaaagtagtagtttaatcaaatatgttcctcaagttgttttaaaaatatgtatatttgtatcttgctgcaggacttctctaattttttaaaaaattgatcgatgtgtaagaggctttcattctttctttctttttttttttttttttgagacaaggtcttgctctgttgcccaggctggagtacagtggcgccatctcagctcactgcagcctcgacctcctgggttcaagcaatcctcctgactcagtccctgaagtagctggaactacaagtgtgcgctactatgcccagctaatttttgtatttttagtaaagatggggtgtcatcatgttgcccaggctggccctgaactcctgagctcaagcaatctgcccacctcggtctcccaaagtgctagaattataggcatgagccccggcagctggccaaggcttttattctttcmctgtagagaatttataagtattacagctaaacaagaaaataacgtactaatgtggattcatggttcaggcatacaagttttttctcttaatactaggttctctcaattctgtgaacaaggagttgtactacttttctctttgggcttatgaaacatctagaataattaaatcagaaaagggaaaatatttgttaagtcaaaggaagtattttcttcatctttgtaaacataagtctctacagcacygtaatccatataacctcagcgtcaagtcagattttttttattgcctgaaaactgctaagtgaacacattatatgtaaaattaaagtagtggaagtatacatgattgagcatttaaactggttatatgcaatattactactctaaatagaaataaaattattctgacaaccttgtttgtgccaagtttttggttatttaaaaggagtaaaactttctatttacttcaatagacgtgatgtgaaattattcgtagagcgaggtagttaaattttgtttgcttgtttgcttaccaaatcataccaaaagagttactttttgttcatttaatgagtacttataaaaaatgaagctattttttagtgattgtaaatatttaagtgatcattccagactattttgcaaaattcaagttagtttgatgctgtagtaatacaatcaaaaaaggattctagattttgagaacaaagataatagaaatgattgcatcatgcttttgatgtatcaatttagcacattaagctgtcattattccagtcttatgctaaataacaccccacttcatgcagtgcatcctgatatgatattaaatatatacagactcattctgatttttataaactgtatttgttaagctttccaatttgtatgaatgaactttgaagcactggggaatacggataattgttcactaatttacaaatgatacttcacagagtaatattaatccaaaagataataatcacatatattttgtgaggctatagaggaggctaataccttagatgtattttgtatgaattactgtatcagttaggtacttcctattaaatcacgtgactgactccattcccagatggtagattttcagttttatagattagcaggtctaggaaagagtaaggttcagctgaatgctactgatcacttccaacttctttttattatctaaaatgtatcacttaaggtatgagtctcacaatcatacagaaaagtatatttagtcaaaaggatggctagtatggttagactttaaaggaaccattggaatgaatccccgctacctagaaaactcttctactaggatatatgcctatgacttaatctgtcatcttatttgctcataattcaaatgttccttgccagaaatacctttcctgaagtagttcccccaaaaaatgtttgtctgtagtctgtcttccttactagagtgtgatcaggtcagggactttccctacttggttcacctagagcaggtctagcaaatagaatgcatgtgtatttgtctatggaatacatgactgaaaaagtgagtgactatagaggtaaaaagaagttttaacatcatccaatctaacctttccagtttatatcaaggaaactaagactatgtataaaggaaactaatggttaactgaattcctcaattatttccatggattgaggaaataaataccagaatcacagttcagtgcttagggacacttcgggacattcactcctgccaatagaagatggttaagaagtggtgtttgggagctggacagacataactttggccagagtttgaatcctagctataccacttactagctatgtccctttgtgaaagatatttaatctttctaagtcattttcttcgactataaatggagatgatgcatatctcgttggattattgtgaagcctaaatgagatcatgtatcacagagcctggcacaaggaaaactgttatagctgtcattgtcattatcatcatgaccgtttagtccttatataaattatataggcatttaatccatgattttctatagtaccacggtagtattttttcccaaacttaatgtatttagaacttagttcaccacagatgatatatgaagtttatgaggttgatatgctagtttagaatactagataatactaatatgaaatttggtttctatactagtttataataccagttactattaaatactcatcaatctagtgtttctgatgcctggactttaacaggtattccatagaaagactacacttttatctgtaatagatttttgatataagaaggatgcaaattcagctacagaggttgaaactctgtggaaaaaaataattcaagataaaatgcttttttctcctcctcatcgatttttctatccacaatagaaaaattccatcagtcagaaaccattcaggagaagatatgggtaatgtcctagacatataaattatatagatgcatattgatcattccctattatatagagtgatctaatttgaatttctattttttgagactagagtcagacgtaataatattattttaaaaaagttgtccagatgcatgttattatgtcataactaccttatttcaatacatttctgtgtttgatagttttgcttattttaggttctaattttaaaatatacatcatttttcatattctttagaatttataaaccaccctagaatttataaaccacctttaatgtgtcatcattaaattgtagctttcaaatgtaacagaatctgtaatttactgttacaattagaagatatgaatcaattccttagcttaaaattttttgttgaaaaagaaaataccatgacaactgactgtcttcagaatcatctagggctgattgattcataatctaaatttagggattgttcatatcagaatctaaggaggacttcacrttgcattcattttgttaattcagcaaaagtagtactagttagatctgggaaagtggatgttaaactttatgaatgccagactggattatagttttctcatttgtacagttagcttaatgatttctaaaaccttttttcctttattttccttttccttctcctgttactctgttggtattctgcatgcagataaacatgtgtatctacatgtaacatgtacacagaagccaattcatatatgtgaaaaagctattcactcctgaccacagagagcatgtcttagttttctttaatcctgaatgctggagtctgatacattttagactttcagtgaatatttcttgaataaattttaaaatatctctacatctattaaagagaccatattcttctaagatgactgtattagttatctattgctgctattacaaattactgtaaactttaatggcattaaaaaccacaaatttattaattttataattctatataactatacagaactgtaggtcagaagtctgacatggaccatacggagctaaaatcaaggtgctggcaaggtctcattcctttctcaagtatctgagagggatctgtttccttgccttttccagcttctagaggctgcccaagttccttggcttgcgaccctctttctccagtttcaaagctggcaaaggtgagttgattccttctcacatcacatcactataatttctaccatcttcacgtctctcactattaactctggccctcctgcctcttcttataagtaccttgtgataacattgggcccacccagaaaatcaggatcatygctctaactcaacatccttaatcgcatctgcaaagtaacttttgccatgtacgataacttattcacaaattctagggtttagaacatggacatctttgggggctgtttttctgccaggcactctgagtgtatgccagtagctgaaagcaccagaggtcttttccttgtaattatacagggaagttgcttttttgcttagcaaatacaagtgcttaggccaaacctgtctgaggttttagctcaaagagaagtgctccattcttttaagtttagatttcattccaaatgtgtaaccagcaattactttctatagtcctatatttatggcctattacttgagatcctggtacagtaaattcataatgcattaggtcattagacaatgacagggttctgtgtggtacatggccaattttttggaacttgacctaggagtctccttttctcctactgttaactttgcaatctcttatgaatcattgtttttgtcactgtacctcatttgctcatctatagattgcaaatgatcactcaatctaattcaactgctagactagtaagatcacaatgaaaaatgttctataaagtgtagagctctctttccatatgtggtacatttttaggtcctctcaagggggctcttttgtactgaagtgttttatttactttaatgtaagcatgtgccatggtgaatctttgcacattactgaaaagaactcagtgtttaataaaatcatacctagcactgcctcaaatgttaagctttctggtaaattagacaaagcagatttatcatgccatttcttttttgaatggcagtgttagtccaagttcctgttgatggtctcackattctttccatagttctgttacataaatgtgaaactttaatacctaaataattctaaatatatttttaatgaggaagtcttcaggacagtggttttccaagttattttgtagcagaaggctttttgcaagaaaatatttttgtatatggcagcatggagctgccatatacaaaacaaatatatgtggagctactctggttgtataaggtgataaggcrccaagtccattggttagtgcccccaaaacacatattccagtgtctgctaacttcactggtttctagggaccatagtgggtttcagtggatagggctatttatttggaaaatatttaataagtattgaaatatgccaaataatatatattagggtcaaggagctatgggaactctaaaggaaggtgtgtgtgtgtgtgtgtgtgtgtatgtgtgtgtagcaggttaaacaaatgagttctccaaaaatttattttgtaaatgttaatgctaagtcagtgtttattctctgagctaacctcacctataaaactgtaacccatgtgaaaattaacacttcagattgtttccttggaagttatactatacatttaaaaaacaggtgttttatatgttgtttctataataatatgcactatacacacagtatttcattccagtataacagtctgtataattttgaaatttttttctgcatctgtcccccacaaacagagaatagaggctgtggtgttgggcatttaatgtatgaatgagtacatgaaacatttttattaatcatcttatgaaaggattattttgcaagaattttttgtcataacatgtagattagtttgtaataagaatcttataattgtattttttctcaaacttgatatattttgtagtcatttataattttatagacgaatttataatttggctcatacatatcttcagaaatgatatttgatacgttaacctggttaattgtctaagatgtgcatcttgtgtaactatgaatatacataaaatggataagagaagtaacatgaaacttctaaggaaagtatttggtaagagagagaattctatttgtttttgaaaaattatggcatcaagttaattcattatttttatgtaatgttttagagaaattgatcacttaatgtttcatatatgtacaaaatttagctcacatttgtcatcaaaataaagtattttgtgagaaacaggtcatttttcaagaagactacttatttagtaaataaaaccataaaatattttaaagattttggttggaattttaaaagactgtgtatatttttattctttataaaaggttattaaatttagttttaaacttaattcacataaagggtatttattatgatccggggggtaattgtgcacagttccgcattcactttttggatttatttttttcccctcatcccagaagccagaatgtaagctacatttctgtttgtattggacctttgagagactatgctacatrgctaatggaaaaacctgcatacgagtccaagttctgcctcttctaaaattcattaccataaaggaagttggttagccacagggagtttcttaggctttctcagtttgatttcttagtccctagaaagttcaagtctgtaaaaactagaagtttttataaggaagttatgagaagtaaatgacarggtatttgaaagtacatgacattgtgtatggcatatgttaattgaccagtgaatgctttacatcccttgatctcttaactagaaattaagtggcagactgataactcctargttcatatcgacagcttcccctcttctgaattccacactcatatatccaattgcaataattggcttcttgacttaratacctaacagacgcctcatactccaaatgtgccaaatggaacttccaattattgcctccaaatctgctccatcctttctaacagctgatggcaactccaaccttccgcttactctgtcagaaatcctgaaggcatctctgactcccctttctctgttacacctcacatccaatctaccattagttcaacttgctaaataatccagaatctggtaacttctcaccatctctgctgctacaactctagccaggctggcatcatgcctagctctgattactacagaaacctcgtagctgttctctcggcttccacctctccttcctcactgtgtattcacaacataaattagcccgagtgatcctttcagaacctgagtcagttaatgtcactcctctgctcaaaaccctccaatggctcccgtgttagaccttacagttgcctacatggcctgtgcaattaggctcttttgtctttgtcattacctcatctctcattacctttctcctcacttactccaatgcagctatacttatccttaccattctttgtgtatgccaggcacattctcattgcactggctgttttctttgcctggaccactttgtccccagttatccccatagctcacttcctctctgcctgtgtcttcaagtttttgattaaatgcaacttctatgtacctgatccctcccgcaggactcccatttcaaatggaaaccccaccccccataataccagccctctttatgatactctaaagcactcatcttctaacacatgctaaaatttactcatatataatttttttcacttgaatttgagctctacaatgttacctggtttgttttttttttttagttttgtcctctgatatttcccaatcatctagaacagtgtctggtacataatagttgctcaatgaatatttgtggaatgatttgagtaaacagcaatttgatcagaaaaaaatgcattcttagagttctttcatttcaagcagtattgcttatttaaaaggaatccatttagacgtcataccctttaaagtcggcagtttgaaatttggcaaacaacttgaaagcagcctagatgaagcggttagaatatggtggtagctttgcaattgtactacctgggatcgattcctatttttgccacataaaaagctcattgtgatgatcaattttctgattctttttgtgagctcaaatacttgaaataattaaccaagtagttgataccaaaaaaaaaaaatctgggtttctgggtttttgattgttttcttcagtacttttttttttaagcattaaaaatccatacatatgattattagttttattcttggagatgccattcttacaggttaaggaattatatctttaaatgagcaaaatttcattataatttgttgatgcatgtatttttcgtatatagccagcatttttccctcaccaacatgtgtattctgttaccgtatctcaaactgcccttcttatgctggatttgtgacattgtgcgtcatcaagagctgttctcagaaacgcagattcaattacgtctaacaaacaggccaaatatctaatctgccaccattacagctatattaatctgcttctatccagtagggccttggcttggattacagtaggaaacaccacatctgtgtccacagctgctgccttttaaacaggacccatagcatgatattctggacaagggccttttaaggtgtctagttttaggtgttgggcaaagcctttcctttagtgttctgggcttctagagcaccacccatttttccccttacagaatgttcactttctgtcttctgggtacccctacattagtttctgttgccctaattaagacctcttttccagaagcaatctattatttttgtccagtgagatctatttaccctagaagtgtttgttcttataccttaatttttaaagtttttkttcagtaaaaaacagatatgaataagttggtaggaaaactattttaaaagggtatttttggccctataaaaatcccagcaggtatctctgcctacttttttgttttataatgtctagctctgaaattattgtagcctctgttttctgtttgttaccagatgatattttaatgttttccttccggatgttaaatgtcttttcttctctttagtgccacttagaaaacttggaaataaacaaaaaatgaagctcatatatttttttaccactgtctagaaaccattacwataatgctggtcttaattcatacttactagaattgggagatgtatttgacttactcataaatttgataggtggaaaaagtagcttatttattacgaagctgaaaatgtaatgttttttagccatttgtattttttctcatgaattgtcttctcatttacattttaaatattaatgatatttatatgataaaacatttcaaatgtgcttgacatacattaatatagttttcaaatggaaatttttaatcattttatggtagacattatttcatttaaaaaattctaaaatgggctttatttagatagcaacacattttatcagtattttcttctaaattttttcatttagckgatttttaacatagttctttaatacttttggaattcagttatacaaatggtagttgcatataataagcaaactgtgagtttttttctaaattgctatacaaatttgtcagccagtttaattgaataatgtatattcttttctgttggtatgtaatatattagatcaactaaaataatccactagaattagcaaactaggtagaaattgactatatttaattagagctagaagccagatagtacagtagagaaatggatggcagttcaaaattctggaatatgaagaaaaatagaaaaagagagaaatagcggaaagtagttttagagataaaaatctatatttgaaaaaagagagggacttgagtgtgtatgctgtggacaaattgagggctgagatggagaagttgaagacacaggatggattaggcaaaggattgatgaaactatatattggaaagggcaagaaaagggagtgtaactcccagatggatctgtcaacatggggtagagatgaatgctgtttccattgtagaaatagaagatacagagagttatggtgcaggtagatttgtaggtaggagggcctgaagttgaggaagattccataatatgtcctctgtttcttctataaattaagaagggaagcattctctgagagtgaagaggaaggaaggtcatacatgttatktatatgtcttctccttcattcatttgctcaaaaaaacacytattgaatgtttccatgtgccatgttctgtgttaagactagaagaagcaaccaaaaatgaagtgcacagtggagtctatcaaacaacttcagtcacgagtcagccaggcagccacatgatgaaaaggactctgtcacttctccactgcaacaactaagtcaccactgagtcaaaaataggatctgcttgactaggtgttgccagtttggggaaaacattttcagtttggttgatggcatcaaaatttaaaaaaaggcttcatgttgatacaagtgggtagatatgaaaccaggtgttaaaatatacacatatatttccttgctccgcatactgcagtgttcattgytacactccagcagcaaggatcatacccagcactgagatcgtgatttctaatacctttgcaaattgaaggaaccagagatctgtgaaaaagtggcttaatctagggctggttcaggaatatacgagaaaagcttggagtatcttttagtgcccataaattaggaagtgctcaaatacacacacacacacacacacacacacatacacacacacgatggtgatatgtcagttggacacaggagccaactgaaagagttcccaatggctaaacaacctaagaaacaaaatgaataatgtattagattataacccaaagtataaaataaatattcatgatcctgtactaatagaaatgattaaatagatgggctaaatagctgtctcttatgtaataaaattccaaatagcttatgtggatattgtcctccttaaggatgtatagtgtaactcgccattccttaagtgtgggctactcacagtggttccttccaaagagagacttgggcaaagtcttctcaggagagaaatgggcaaagagaaagagagactgcattggagaaaccttacagacactgcctcagccagatgatcaaggtgaccatcacaataagtggtgttgatagtatagacccataatatgatgtaattagaataccagtttgcctatgtggttgtctcctcaaaaatccataactccatcttatgaaaaaagttcagacaaacccatttgagggatattatagaatatacacgactagcattaaaaatgtaaaagtcatcaaaaacaaagtcagaaaaaattgtcagtcaggaggaacctgaggagacataaagacccaaatgtattataacatcctagataggaccctggaacaaataaaagacaatagataaaaactatatctgagtaaaatattggttgtgtgtaataatacgtcgctattggtccattagttataacaattgtactatgctaatataaaatgttaataacagaaaagtgaagggggctagtggagggggcacagtataagagactatgctatcttcaaaagtcttctgtaaaaagccatcctaaaataggaattttgtttaaaaaacaaaaaatccgctctgcaaattatacactctttaattattttgaagctgctcttataccaagagatgaagacaaatccaataagtactattttgatttgtcaaatgcccctttgtagaggccacggaagctgatggagtaatatctactgttgctttcatatctttcagcagaggaatcaggtaaaatagtcaacattttacaatgttattgcttggggtttaggaaatttcacctcccagaaaggttctatgtgcttatttttaattacacaatggaatatctggcagaacataagacattttaagctgtaagtagaatgattttccaggaatttctgagcatcttagagcctacatttaccattatcagaggcacctgagtactgcttcgtaaattgcaacttcgttacgttagatagtgtcctatttccatgagagtgatgacagattcagaagtgccaggctccaaggaagttgttcactgggagaaaaagactcaatgtaaagcatattatttattattattgtggtaacacctatcattatataaatataaccattcaataatgccgtattattcataatagaagtcacaagattcttatccattcttcgtactctgggcttcctatgagtaaatgtattttgttctttttgcagaattaagtaaacagaattatttctgctttgccaaaggatgttgtcaaaggcctgctcctcttctgcctatatatttttcttttaacataatgtatgcccttgagcagtgattctcagtctttcgtgttttacattttgtcacatgctatactgaaaaatttgggtcccactgtcatagaatcaaaccatgtttatagtcattcgatgcatatatgtttttatatttctaatataaatttatacgattttagcagtaaactatgttaatacagtacgttagaaatatttgtgggtgttgagtaaaaccagagaaaataggggatttggtaaaatattgtctatttcataatatctgctgactgacattgcaacatctctaaagagaatttgtttttgaaaggcagaaaataaactatttcatgagtaatagcagcttagcattgtctaacagctacaaaatccatcaatgacatatactttctctggagaaaggtgttagcccttgggatggttgtaagacaggttttgtctcattttccttaatctacaaactgttggatgtagttttcccagttgtattaatttctcatggaatttgtggaaatatacactaaaattactttagcattttcaagattttcagatttttttatgaccttttcatcagtgtcctatgttaggagattgtgttgatatgttatattaaactgtaaggaccacacaagcagttttgacacatctgatagagattccactgaagttttactgagatgattgaaacaatttagacagatttcagtcaatttatcagtcagtaggactttaaatgatgccattaaatgagattaaaatatttctgaatttaatactgccaacttaaagtactgttaactttttttggcttgtttcaattggaagaaaagaagaggtagtgaatataacacacatctggaactaagaaaactaatttgtaagtcccacctcctccgctaaccatctgtagtctgttacacttgcagtggcttccaaccttggctgcacattaaaataacatgggaataggtaaaaatcccagtgcccaggtttcaccctaaaataattaaatccacatctctggggtgagacacaggcattttatttttgtttgaaattttcaaagaagatatcaaaatttgcaaggcataatcaaataaggcaattaacatactttagcctatacctaatattttgcttgtttttagtttcaaatcatcctaggatattattgattactcaactgattgacatggtttgggaaataaggtattttgaaaggaawaatgtcttctttttataaactgtacaggaaccttctattaaattctgtaaatgtcattgatctcaaatccatgcatcacatgtgtaaattatattatttgtgttgtgtttgaagtaaagcatgattgataacatttgatgtgaaaatatatgcaatggcagtaacgttatcatttctaaaagaacagaacccttgaagacaaagggtagaagtaatgtcagtcctgtttctacaatatttgagctatgtgaccttgagaaagtcatttaaactttctgattcttaattcccaggtctataattgttatactttagctttgcagttatagatttgttcagtgttaacatcacttgtatgaattataaacttattgttagttaaacatgctagaaaaagttgagagacagtgaagcataatagaaagcacatggtttttggaattgaatttggcttcccacattagttgtatcttactagctgtgtgactttggcatgtgacctaacccaagtttatgtaaaatggtttcaataacatgttcctgtcttagcccattttgtgctgctgtaacagaatacctgacactgggtaacttataaagaacagaaatttatttcaagaacagttctaaaagctagaaagttcaagattatgatatcagtatctgacaaggaccttcttgctgcatcatcacatggcagaagggcaaagaaagggcaagagggggccraactcatcctttcataatggtatcartcccagccatgagggtagagccctcagggcccgttcaactcttcaaattactacatcttaatactgttacaatggcatttaaatttcaacgtaagtttgaaggggacagatactcaaaccatagcactttattagaagttgttttaagaatttaatgagacaatatatgttaagggcctactgcctggcatatagtagatactgaagaaatggttgttgatagtgatgataatgtaatataccactaacatgttaaatgtgtttctgaatgcatgacctcagaatatatgtcaaatatatacactggttcctttttacaaaagcaagtgttaatgaatgagtgtaaaactccttagcttaaaaagtccactttacacatctataggtagtgatttgagaagttcctagaggacagttgatatggtgtgttagataaccacagattggaaatgctagccctctggacactcaaactttaactctggaaactgggttacactggaaagaatctacaataaactgaccttccackggacacgtggagtattctaactaatgcagaaatccgaagcagactagagtatccctgatctccttagtggtgtagaatctcacactgtattatwtatttatttatttatttatttatttatttatttatttatttattttgagacggagtctcgctctgtcgcccaggctggagtgcagtggcgggatctcggctcactgcaagctccgcctcccrggttcacgccattctcctgcctcagcctcccargtagctgggactacaggcgcccgccactacgcccggctaattttttgtatttttagtagagacggggtttcaccgttttagccgggatggtctcgatctcctgacctcgtgatccgcccgcctcggcctcccaaagtgctgggattacaggcgtgagccaccgcgcccggcctatttttttttttttcagaacatgttggcttagtattctctgggcaggaggccatgccaaggaaagtttttgacctttcaaaacctcccaaaggtaatgggagaagtgataattattacggaaatgtgaagacaagcatacttttttttcatagattcttactcagactcattcaaaaagggatggattttgagtattcattttggtgaagtctctgaccttattagatagtgatacctccaggtcttgctttatgtggggtcaattactgagccgttgatgaatttcatttatttcttgtttaatagagtggcacttaaaataagtggacatgtaaaagaaaaatagatttgcttgatttgtatctttcaaaatggtagtgaaacaatcctgtaatttacacgaccagttctacttcacatatattttaaatgtactatgatcaacatagtcattacctggcatgtagaatacctatacatttacacatgtaaaaaatgaagcctcaatgtctttggtttgtgctggatcatttctttcagggtatggcattctcaagttattttctaatgaggtttctttaaatttttcaagttgctttcactgcgattaatttaatagtgaatatgtttataaaagtctgattctagagacaggctctgaaccattatgctatggcctctttgactacaaaaatcaaacgtttttattttctaatttgttaagttaaatatttttctatgtagtgaagcttaactaattagagagaccagcaggaattgtaatgtcaccaatgtaatttacattgagataagttttattcaaaagaatgagctaaaatattttattctgtgaggctaaaaactataactaggatgaggaactcttttctcccaatacaaattatagaatttcaaagcagraagagcatcttgttttacccctctttgtacagatgggaaaaagagccccaggagagcacaagatttgctcgtgtctcacaggcatttactgaatggcaaagttgccagtaaagccctgtagtttgactctgtcgacagcagaaatgtgttcttctatttcatactttccaatgcggttctagaaaatgataagtaattttgaaagttggtttatttctttcagagtagctagtgccattnnnnnnnnnnnnnnnnnnnnnnnnnnnnnnnnnnnnnnnnnnnnnnnnnnnnnnnnnnnnnnnnnnnnnnnnnnnnnnnnnnnnnnnnnnnnnnnnnnnnnnnnnnnnnnnnnnnnnnnnnnnnnnnnnnnnnnnnnnnnnnnnnnnnnnnnnnnnnnnnnnnnnnnnnnnnnnnnnnnnnnnnnnnacactttgaacaacggggagaaaagaggatactttccctctgagtatatttggattgcttggttataaaaatgttgtgtgattattgtaaactcttattcagaatgttttttctccgttgtataatgggcaccatgatgacataaataagcttctttataaaatttctgctgtgtttcctacagctccctcctatgacaaactgagtatttgtgatttaattctactggatgatttacttctactggatatccttaagattatatttatttacaaataagtaaaaatcactgaagtgggatccctgggtttgttgttataaaacttattaattatcttaaatatcaggttttcctctcttcaggctcagtcagtaggtcagggaaatgtcatgtggggccattttctcttatccctgccactttgacaatggttgtcaaattagaatgtgcacaccaatctctcgctaacttgacaaatgcacattcctaggtcccaaccttaggattatgacttaataagcctgggatcctgaatgtagcccacagaaatccacttagtaacacccgtttacaaagagactcctaatctgcgtggtccaaggcacattttgagaaacactgactgtgctatgttcttttctggagacagacagggactcatgtctccctccttggcaacagctattctttcatgggtaattcctatgtactatttgaatatcaaaatatttwtatctccctaagaatggggagacacaacgtatttgccccataagggtaaattgcaaacaaattgctccagtgcttcagaaaggactggttattcattcctgggactgctttataaagagagatcttctcaatattcaaatgtattacaggcatagaaaattttttgcatgaatatataaagactaagaatcagttctgttttttacagcctgagaggacatattttgaaagctttctaatccttgctatgacaatgactgaacttttagagggctcagagttagagcttcaaagatatttaataatggagaaaaaaaaaagattcatttgggagaagatctccaagtataaccaaatttatccctttacctgtggctaataaaataactgaattcaaaaagaaagcaaaagcaatatatattttgaatagaagactgctttttaaaattatgtaaactattctgtcattaaaaaaaagccttcctagtgttggattggagtatttccatatttggaaaccaagattaatagatgtttcagatccgaagtgtttgttcttccatctttttttcccccttttgcatgtaaaagagaatggtgaccaatttttttggtaaaagagttaataaatcacttaataatggatttaaatgaacagaggcataatcagatttttttaaaaaagacttttatttaattctccagacgcaacacttagatagaactttctgtactgatggatttttttatagctatgttgttgaatctggtagccacagtcacatgtggttattgcatccatgaagtgtaactagtgtaactgaggaattgaattttttaaaatttgatttcatttcatttaattgaaattgctacatgtggcagatagtcattgtattgatctgtgttgctaaagaagattgtgtaaaatggttttcataactttggggtagcagttggcatttttatgagactaggaagtatatgattatgtagtgttgtagtttatgtgactaaatgtggctccttatggaggagttctttaactttgccatacttataaagatagttattatttattctctctacttatattttgaaagtccctctcttaaagcaagtagatatcatggagtgagtctggaaactcctgttacagaacaccaggagtggccaaattatgactggtgccccctggagttgtgcacacagagtctgtggctacccctataagctgagtcacatctcaaggcaatgtcatattcacttttatgtctacaatgcttggtatggaattgattactgacaaatctttgttaagtaaggaatatatatctcaattttgatatccgcaataataaaggatagtgaataaaaaatattttactatgtgctcatagaacacattgtatgaatttgccctttgatgtatatattcattaagttctacatttatgaagtacgctttgtggaaagtattaatttaagtatttaatacgaatataattcagacacagtatgtctactgctgattaatgaagaagggaatgtaaaaatatgtgctgcatcataaagtaactgcactaatgaacatatgtgcaagatgtagttcccaatagcaaaggaagagaaagggatttttgtttggttgattgattttctcagtcctgtggcagaacaaaaaaggcacatcagagaaggaaggctgccatcagggaaatgacttttgaggcgggttttggaagatgagctggagctagcagaggggtggtgaggaaagtaaggcctgtgctgctccaggtactttgctaagggacatcatctcacatcggttttctccatactcctccaacgtagatgtccttaatcctcatttcaatgatgatgcagctgattcggatttaaagaagtttgcctaaggtgacatcgctattcagtgagggtactaagctttgaacctaggtatgtttaacgctaaagcctgtgaattgcaccatagtcattggtatcagtaatgaaaaatccaacgtgtttggtgaaattcaagtagtgtagtatcgccaagcacatgatacaaagagaagcaactgaagtgctggaatggaggcatgtgataataaaaaaccatctatgccatgacaaatacactggacttttttctgtaagtaatgtggagccctgggtgggttagttttaggctggcaatgacatcatgattcctaaagaaattcaggagctaaaatcaacagcatatttagctaattatttgacttgaatttccattcaaattggctttattttttcctgaatacgcagttgcttagaagtggttgagttccatcctggtgcgtgctggctatcaaccaacataggagtaaaaattcaccatgagtagtcagccaaaagacacatgcagatgcttaggaaaataaattataaatatttcttatgtctgccagtagcaatgagaagattttgctatattgtgttttttgatagttggcttgttttactgtatgcttatgaaaacataaagtagcaggacaacagatcacattgccaaatgatttctaggatttggcccaaggtttgatgatccctctgccgcttcttggctttgtatgctcagaagcacccaccatcagctgtcagccctgtggcaaaaggaggaatggggtcagagtcaggcaaacagaagccagagccaagtgttgttctgagaaatactagcatctgtttagtgcagtgagttctctgctttgtacttggcaacccacttgggactcatgctgcaaagggggctgatgatttaaaactgagggaggagatccagaggggagaccttggctcatgaaacatcctcttcacctctgtgatgggccgttcttcatgtcctacagtttgaactaaagaatggcctcggcttctcctgtggatgtaaacatattttgttgcaagtgccattcgttttatttgttgtataccttttccttcaaatatattcctggctaaactcctggctgtctctcctggagtgtttttttttttttgtattcttggggttgtaagaatcaggttcatgtggaggtgtctagaaacaggctggctggacaggaaggaaataggtggatatagttttaaatttatacacatcttttggagccaggaacttctacacaatctagcttctatgagataaaatttgtggtacgaaagaggagtggtaacatgaataataagagattttttttaagtctagaaaaccttagatgttgggagtgtaatcaagcattttagccagtcattttgaaaggtaagtgagtttaaatgaattgaatactcagttgtgaattagtgatactgaacatgtacactgtcttatcagtgtgtttcatagtgattggtaatgcccagatttccaatttgatacacagtccattttaaaaagatatatgtgtgtattttatacgatgctttgtagttttgaagttttgagataaattatttagaatcaaatgctcatggaaatgtctgtaatattaaaataggtttatttcaagattattaattcatttgttcaacgagtgttattgagcgtctgttgtgccgaaccctcattaacctcaatagggaaggtactaggttcaagaggctgaagaagagaccccgagccaacaaaggagacatggagtttcattaggagcttacatacagtggagagagtcagtggcagtgggctggacaggagaaccaacttacctacagaaatgatccagtggtggcaggctgggcaggaaaaccgcaaccacttgcaaacagcatgcagtttatgtagcattttcacttaacactctctcctttatgacctccacctggcaaccctcattaaccccaaactcagggcctcattcctctgtatggcccatgttccatgggatgggatggggtttcagatgttcctcacagacaaagaacaaatcttcgggctgtccactagattccctagcttgggacacactttcaggtgtgtctactgtacagggtcattctaagggtttgcttaagtttaccctacagcatcattcacgtctgctctctcatgtgcttgcgatacagtgaccatcaacacaagggccctggtctccaggaacttacactctgtagagcagtgtttttcaaagtgtggttcccagatcattagtatcagtgtgctgggaattgctagaaatgcaaattctcaagtccccggcctagacctattgaatctgaaactctgagagtggggttcagcaatttgtcttttaacaggtgattgtgaaagtttgagaactactgcaaaagacagataaattaactgatgattattaagtatgccagaaaaggctgagttttacaaagaaaataaaacagggaaagaagatggacagtgtaaaagtgtgtagcttttggggtgttgtctttgtctttgagcacttgactgatgtgagaatatctgggaggaaagctttgtggttatctcggttagagattttagtgagttgaggcacggttgggaattgtgatgtctttagaagggctgaacctccagaatttgctgttgaataaattggaaatggtgatgtgagagggcagaatgatcctaaaggttgttgatggtacctactgatctctgatgttacctcatagtaagatgggaaaaaatgaaatggggtggggcagggaaaagcagactttgggggaagaataacacattttattttagaaaagttgtttcaaaagctcattagccatgtgtgaagctatatttgtgagtatgccattcatggggaaggttggcactgggaatattaactggggagtcatggtcatataaatggtattttaaaaaactagttagcctgagatcaccaagggaatgaatgcacatggaggaggtctaaataccaagtcctggggtatacctggggggtggggtgggtggcattaggctaaagatagtgaaaattctaatgaatgataagtaatattttgctatgttgatcttgagattgatatgttgaaatggcagcatcctagaccaatcccaagtttaatgccttccttgaagttgccatgtttctgtttcggagtccttggtgccacaggtcccycttgactttcacaggccagggcttcttgccatacaggtaagtgttctcccttcccagcttatgggatccagactcatcagctgcccgctgtaggttgtccttaaaacttagagaatatgcagagagcatacacaattctgcttagaggaggagcactctccttttcctcttgtctcagttgtgatcttgtcttctttctctaatttccttttcctctattgaactttcaacaggcaaattctttggtctgcagagccaaaagaataattgtctttctttttaagttaatagtacttagatcattttgacagttgtcttatttattaccacttacacagaggcatttcttaatgttgaattcaaatgttgatttttagtgtcctagaccttgatattttctgatttgaataccctgagctgttgaccaaagcaacaatgaaatttataatttcttaacgggtgtgtgattcttgggatttctttcagaaaacaatacttccctgatgtaggaatgtatcacttaaagtaaaaaatgtttttaaaatttgaattatagaagagaataatcagtggatgattcacttcgtagaaaagttctttgctttaaaatgactcatcaagtgctattgggaacatttaaaatgttatttcaattgcacatactctttaggaagatacaagtttattrctttatatgtgtgtatcactgataaaaggtattttcatatatttaacaaaaatttaaagggaggaatggttaaatgactgtctaaggactcatacctctttagtgggcaaccaagtcttgaaccctagttaccagttgtcatgtttacttgtagaactaccatcacggccccaggggaacagcttaagaaagggataggaggaataaaatggaagcactctatagaataagtcttcatctgtactcctgatttaacaaattctgatattacccactgtgtttaggtttcagtgacaagttttcgtagcagttgcggctgcatttagctcttcacatcctcccaattctaaaactgcaaggtattgtaacgataatctgtcccatttcctcgtttttgaatgagaaaaccacagcctagagtagccattacttgccaaagctttttttcttagaagagaggggggatcttcagttatcttctagaatgtgacaaaattttgccaagatcatggtgcgtgctcactaaaagatgatgaagtttattgcctaaatctcaaattcagtcaagatgctacttaggccagcttttaaaatttgtataatagctagttttttatttaaatttttaaattgtgaaacagatcacaaattaaagagcacatataacatatatagtattacatatgcatatcatttaaaaatattttatatatagctatatatcttatgtatgttatttttactataagaataataataaaatataaaatgaacacacaggcatcaaccattgagtctaagaagtaaccattccacaatcttggaaagcccctgtgggtccctaatctgtctcaccccattccttgccctcagaggtaacctctgtgcactaccctcttgtggttagaagatggagctaggccgggctcggtggctcacgcctgtaatcccagcaytttgggagactgaggcgggtggatcacctgaggttggtagttcaagaccagcctgaccaacacggagaaaccccgtctctgctaaaaatacaaaaagccagacatggtggtgcatgcctgtaatctcagctacttgggaggctgaggcaggagaatcgcttgaacccaggaggcggaggttgtggtgagccgagatccaccattgcactccagcctgggcaacaagagtgaaactctgtctccaacaaaaaagaagatggagctacattactgctccggagccttgggcaagttattattctccctgtgcgtcagtttcctcatctgtataaaaggaatagyaatatatgtgttgtgaggactgaatgaggtcacccaggaagtgtgcttacaaaaatatgttgtgtagtcatcatcgtttactattcttgttactatcatcatgttcagttttacatttgaaggacttgtaatgttgccaacaagatggagtttgagggactaaaattgattttaagaataataatgttgttgttcctttttcaaatcttttaacatggaaacattctgatttgrttgggggggggrgcttttgacatcatctgtttcaccttatcactgtgtactttcaaaatatcttcaagatgctttcattgargcaacaagaaaattgttttgaacaaagaccctttagygtcagtcactatttcagaatataacaccagtcattgtttatatgatttactcttaataggattttgatattctgctgtgtaacgttgctgctgactgaatgtctttgaagacagtaaaatttgaccgactacaaaatattacttcatttttggggggtttagtctgtttggtaaggttactaaagagtacttctaaaagtatgagaggataaaggattgagatataagagaaaagttgacaaaatcagaaaactgtgcaatgaggtaatgagtaaccaaaacttgctatcttatcagtactgagaactgcagaaaaatttcttacttggagatttgtgcttttctttgagtattcataaataagagtgaaaaacaataatcacttttctcagtaaaagaaaacaaccttatacttgaggacttttgtttcaaagttggtaaggctttggatactaatataaaattcaccagtaaagtattttgaaactcttaatgccacctgtgcttctgaattcatatgaagattattgtttgagacctctgtggtgacatggacatcacacttgaggggtgagacatatcttcaccttctttacacactggctcatcttctatttagttgatactattgttcctcaataaaattatttttctctctattgatattattttcaagttgacttctagtcagcaactctgtaagtatctttttattggcttttagattctgtattttaaatgagccagcaatatttcaatttcattgagattgcattatatcattttgaaaacttatttgcctgtgattaaatttttgaacaatgtctgggatctaaaaactcacttgaaaatcattttttaaatcaaatttttttaaaaaagtgttacaattatagcaagtcatcatggaaaaataaagtaatatgggtatgtataatatgccttctaaacctctaagcatctggaagcagagatccatgttctgtgaatgacctactaatcttcttaatgagttcatagcaaggcatgtggtatttgcgatagaaaagactcagtaaaagctgtcttccattcagtttttgaaaagtgaatggatrccagtttatgttatttcctatagtgcctatcttaaactgatttttttttttttacttgctgaatctcatttcatgtcaatatgagttttgtattggtaatatagtgtttgtaattgatgatgtagccaactcctttattgaagtaaactgtgaagctaataaaacatcttcatgttttaaggccattaggagacatttttttctgtgtgtgtgtgtgtgtgtgtgtgtgtgtgtgtgtgtgtgtgtttgagaccaagtctcactcttgtcccccaggctggagtgcaatggcgcgatctcggctcactgcaacctccgcctcccaggttcaagcaattctccggcctcagcctcccgagtagctaggattacaggcgcctgctgccatgcccggctgatttttgtatttttagtaaagagggggtttcaccatgttggccaggctggtctccaactcctgagctcaggtgatctgcctgcctcggattacaggggtgagccactgtgcccggccgtgtttttttgttttgtttttgtttgtttgttttttaacataatgaatactacaacagaaacataattaaatagcttctaaacatttgagaagatgaatggatcactcgtttctaaatggatagccaggagagttagttaagtatttctgatcttatagtgaatgataatgtttgtacaacctaatagttgccccttttcctttctttttcttctctaatartaatagcaaaaacattgtttctggcattcagtgagtgccagataaatagaaaggctatgagcttgatgcacagtttcttttctttttcctgggtcctctctcctcccaacctacatttcttggcatctttccgctgtctgtttgttagagttctgactctgacgtcaaggactcacagtgagtgacccccgtggcaaacctgtaaaacattatacaacatgaataagaactttcttattagatctgcagctggctgagtacagacatatggcagcaaggatgttttggaagaaaggcattgcttgacaaagaacccagtctcttgaataaaggtttatactggcactctttgatgtttataatacccgatgccaggggcaaaacttttttccccccattatattgttattttactgtttaaaccccatcattttatatgttgcggtggctaaaatgtagaagcagacattttatgtgtgtctgtataactttaaaaggaaaaaaaaaaaaaagcaaaactcaaaaaactttctcaggctctgtctacccggctgtaagtgttcgattttctgaggctgagactcagattgaaagtgagggagtttgtaagaatgggcccagtccttttgagcaggttttaaaaggatgattaaagggtacataggctttgtaatgccctgacaactttaattgtttcttttggtggttgtcctttttatcgtgagtagttgttctcagttgctaaaaatttaggctgggaataatttccaacctaggaggttgtcacactgatttgcatttggtttgttatttcttagtcttttcaatgcagccctgctttcatcttactccctttctcaaaccccagctactgacattatgtacatggttgtgttttgtgatctgtgctagcacactggtgttgaataatatattgtgaaatattctgatggtgacaattcggtagttgccccaggaggaatgatgacactttgaatcagaggcacaaggacagagaagttcaacctagtggagagccaaggtaaatgaatgaaagcttctgcctccacaaggaatatctaagtccttttagcatggttctttgcaaccttgattatgtttataatgttcaaaatctttgatgaggccattgtcttcctagtacttactgcatctacaataatttagtcataagatattgataaataaggtatgcccattggacatgcctgatgggattttaattaacatctgcctttgacaactgaaacaactgaagggagggagaggtacatgacttttgcagagcacatattatgacagacgctaggggtataacatctagcaaataggtacttgatgacatttttatgaatactatgatttatcaaaataagtatatcctgagaagtatatatttatagatgaaacrgtatttacagagaatagactctagtttagagaaactgaagagcattagtaaaagtgttaataagaataatattttaagtactatgagggacttttttcctggtttttaggttttcatgttaaaaattcatgagcaggacagatatgtttgtcttgttgattttatctctataacgggaattcaaattttaaatatgttctagaatcatgaaagtcatggctagaaaggtcttggagattatctaattgaggagtcccaaatctctaaataaaatctaccagaagaatcataggtcaattactacatgtataattgttccaaataggtttttccagaaagtgcagaaggtagcacagtcctcaccaagttctttcattcagcaagtgctatcaataccacttaccaagcatatattttacttggagaaaatgaaaattgctccatccataattggttgagagcccctttaggtataataataatcttccctattatgtagttgagaaaactgagacccatatactaagagttgaattgtgttttccccaaaagatatgttgatatcctaagccctaacacctcagaatgttaccttatttggaaatagggtctttgcagaggtaaccaagttaaaatgaagtcattatggtgggtcctaattcaacatgactggtatcattataaaaaagagaaatttggacacagacacccctggagggcagatggccatctgaagacagagaattctaatgatgcatctacaagccaaggaaccccaagaattgccagcaaaccaaacagaagccagggagaggcaaggattcttctcttacagatgtgagagagcataggcctgttgacatctagatttcagacttccagcctctagaactgtgagataataaattactgttgttctaaaccactgaatttgtttacctagttatgacagctctagcaaactaatacatcatagatattagtagtcatggtctcctggagaagtaattagcaaggtagtcaagtctggaacccagtttaattcccaggttcagtgctcaatgcctgtctctagaaataaaactttttaatttcttttgctgtaaagataaatgcaccgtaattcacaaattgttatgaggactatttttctgttgtccatttttttggttatctttttactgacttatttcatttataacacaatcttgaagtctgataatttcaggtacagacttcatttattaaaataaaaactcaaacttgaggagacgaaagttattcgatcatttctttcacttcccacagttggttaatgaaatctggagaataatataattgttatatctttttctttgcttagcgtaaacactcaaactataagttatagctgataacactcaaattataacttataagctgtaccataattcatagtagtcaatgaattagtcagctaaacttgaacatattactacaacttatgggcatacccaactccagatagtagaaataagactcagagtatacatttcatgagataaatctaatgtgagtatccaataatagattcaaatatttttcaagaattgactatgagtctgtgaatatatattaatgactatacaatacttttttttttttttttaagagatggggtctcactgtgtaactcaggctggactctagctcctgagctcaaatgattttcccactcttagctcagccacactctgcgtagctggaactataggtgtatgccatcacgcctagcttaaaatatattttattaagaattggtgctatggaaaagtattgcttcaaccatttcccccttttcaagctaaaattaattagtaatttaaaaagagacatgaacatcaacaaattaaacaatggaacaaggatcattcaagtcctcctataggcctcttgatctgtacattaattggaataatggtctgttctttttgtagaaattaatcatgttcttaaacacctccatkcagtgtaagttctgactgtttaattaaaactttatagtaagctcaaactgggatcctgaaaatgaaaagatattttttgttatctggttcaggtttttgttaggatgagcactctcccttatgataatccagaggtctgctcctttgaaatgtcaccccaaagtaggttgcttgaagttcccagaggctaagagggttccccctatcaggacatagttatgacacctacacagctcccctcttagcttcatccctcttagaagagtttctatttatcttcatattctgagacgaaattgttccatttattctactaacctcagcaaaagctggttatgttaaaaacaaacaaaccaaaaaacctaactgcatctaggtaaacattttcccatatttgttcttgcaagatggctgataaggcattataagtggtgatccctttattccatcattacaggaaaaaataatgtttatttgatgtgaaggggaaaaattaaaattaaagataattctatacttcggatacttgaccatattaaatttacaaaatgtatagttgagttttaaaatcacaatataagtagatttcttctactcacaatcattatattagataagaaggtactcctcttgatctctcctttgctccatcataaaatccttactagatgggtaagacggtagttgtgataagacagtagtagcctatcctgtcttatacgtttctgtgaagcccagagaggtgacatgaatttctgaaggttgcagaactgagacttaaaacttagtgtgaaatttattctgttggaaaaaaaaattgcactgtaactatttctttgaactttgggaagtatatccttattagagaattacagtgtcaagacattgcgctattattaaacaaatgataccactattttgacaagagtggtactttccaaaatacctaagaagttaattgaagacttggaattatcagaggatttattttatgttgaaaattctgacttatttttaaattgtttattccatctcataaacttctatttgttatttaattttaggaactttgaaataaaagtttttttttttaatatatcttatgtcctgtgtgcaagtctaatggatagatctgtaccttgaagttccaacttctgccctcagagatgaaagtgacaaacagcaaaatatggagcagatacattgaaaactttaagaaacttaatttttatttagtttgtgcttatttactaatatgttctctgaatgcaaagtaagtatacatgtagagtcatctttatgaaaagctatataaagagctataaataaaagggatagataggtaagacaaaaaaaggcacactgacaaaatctgcggtaagaaatataatgagttagattctaggcatttgtcttatttaacatggagtaatttgtggatatatatatattgtgtgggtatttgaaatttatgtagttattttaaatcatgtaatttatttatgcaattattttatatttatgttaacttatttatgtaatgattttacatttattaagctgacgattatggtatatggaacttaaaggtataaatatacccatttatggtatatggaactgaaaggaataaatctatccatttaccaatcagtctgagagattctctggtttcttacaaatacagattggcaacaccgatgtggttaaacatgacaggcaaataactaccattcaatgtgaatattagcaatactgacaagagaaataacatttgggttgaatagatacatttatgtcaggtttttgtgtattagtttctctctctttttttttttttttttgagacggagtctcgctctgtcacccaggctggagtgcagtggcgcgatctcggctcactgcaagctccgcctcccgggttcacgccattctcctgcctcagcctcccgagagctgggactacaggcgcccgnnnnnnnnnnnnnnnnnnnnnnnnnnnnnnnnnnnnnnnnnnnnnnnnnnnnnnnnnnnnnnnnnnnnnnatattaagcgtcccatgctatattgagataactttcaaacataatacaattatggtagtaataataatttggaacttcaactatactacttgacattttagcatttatgtaattaattagttaactaacttgtaggtgccaggcacagctaggcctaccattaaggagtttgcatttttttcaagatagttatttatagtacagtatgaaaagtacacaaattttgagcagtattttccttttttcatggcttcccttattcaacttctttaagtaagtaaaattccacctcagaaatggttatccatgttccctatctcctccattcctattgtctctgccttgactcaagacctccttatctcttgcctggattatagaactgtgtcataacaggtctttctgcttggagttacccaccttcacttgaccacaatctgtgatacccagtttctttttctttttttttttttttgttttgagacgtggtctcgtcctgtcacccaggctggagtgcagtggcgccatttcggctcactgcaagctccgcctcccgggttcccgccattctcctgcctcagcctcccgagtagctgggagtacaggcgccaccaccacacccagctaatttttcgtatttttagtagagatggggtttcaccgtgttagccaggatggtctcgatctcctgacctcatgatccgccccgcccccctttggactcccaaagtgctgggattacargcatgagccaccgcgcccggcccccactttcttacactgtatctttctaaagaataagtctgaacaaagtagtgactattttaaaccaatagtatacatttactaaattcttagcctgcctttcaaaattacattcagatttttccaccattttctttttagtgcatcttaagtacaggtcatccgtgcgcccgtcttttttctgagcaaatcacctgtgtactttcacattcttagcatctgccaggggtgttccatatacctggcatgatcctccagcccccactacccgacctactttatttcttcctggtaaaaccctcttcaaccttcaagccacacgttatgcagcctttcctcgcactgagaaacagatactttaagggttatgatatttattatattgtaattatttacatgttttgtttccctctagagaatgagagttcctccaaggtggagactcattcagcttttcgtctctcttacataacctktgcctggcaggttgtaggtacccagtgattattgaattagttaatatacgcaatatggatttgcttgtcagagcatgagtatccatggctttctgaagtccttcaacctttgcttgtgctacttcctctattttggtcctcttcaataggcgaggtgattatgatctacctctaatgggtcacagtgaccccaaaggcaaagcaatatattgatctcccttaaaaggatgtatgccacgaaataagtgtttttatcttctcatccatattcacatttatactttaagtgcaatgtcctgagtgagacaaaccttcacactaatctgtgtaattaaaaatattgaaatctcattgcttggcaaccactctagacctttggacacattttctggcgctgttaagggggctcaggctgcaattgagatatagattacctatttaaaggaatcatatttttcccctttgaaatgtctgtcctttatctccttttgatggattttctaatttattaggctttgcttttttgggaagtaaattatacctgttgacacagttgcatcctcatgcaaaaacaaagatgatatcattaatattttatggcttaatcattaaatgtgaaagggtgaaatgcttgtattgcaattgaaatgaatcttgaattgaccaggtctttctctgtgggaataaaaagagaataggtatgaactttaataaaaaatggtgtttaactctacatttagcagaggtcttctaagtaattttgccatcagttttcttcccacaaattctcccattacataaataatctgctattatgttgatagactcatctttctgaaatatagacatgttcatataattcatagtttgaagtgtctgatgtctcctcttgcctttaaagaataccctgaactcttaaacttcacgtataaggttccatctgtcttgaccccaatctacctaggatttctcctcatccctggtaatctatacataccttaaaacccaactcaagcattacatgctttctttagctcagttttcactgatgccccagcctcttagggaagaattcattgtttccgtatttgtgaattatagcacctacccattcatatgtggaggaataaaatgtagagagtaagagttagtgtttcaaaggcagaccttctggctgtttgcattctgtctgtgggaccttcagaggattccacggagtaaaagcactctatgtgtcccagttctatcatttatgagagaggggaaataatactgctccagaaggttattttgaggatttttaaaataatgcatgaacagtacttagtacatgcctggtacacagtaaggactcaaccactaataaaaaaaatgttttgtgtgcttacattttgttttgatatgcttacatatttttcttccctattaaaatgagatggccagaattctgtcttcgttgtacaggcagcatccaacagctctcagcatataatattggatatgtgattattaatatatgtaaagggtaacatattggtcaaaacattaattatttggagaattattcgattaataaaatatgttttatacatattaatgctgaaatctctgctcaagtgttttaagaggggatttactcacagaaaataaaggaaaatgaaagctactaggtgaactatagtttaaaataacaaatccaaaaatgttagatattgcatctcttcagtggagtattatgcctggagccaattttgaaataaaaacaatgtaagtacttacaaaatctccatttggttcagactctgcaggtggaactaatgtaagtggaaagattcctaaataattccaaagtcactatgaataggaataatgatcatcatacatatacttatcacttctattagaaataagccatgcttatacatattgtttaatatagccaaaatatcttacacataaagaagttagttataattccctactctattcctcaatatttttaacagtgcttctcaaatttaaatagggatgacaagactgatgtttatcaggttttcctcaaggagatcctttactgtgaggtgtgtgtgtgtgtgtgcatagaggtattattgaaatatgattcacataccatgtgatttatccacttaaagtatacaattcattgttttttagtatattcacaaagttatggagctatcgccactaatccagaacattttcatcatgtcccctaaaacacctatgcctgttaacagccacttctcatttcacctacctctctactacttccaggcttaatcaatgactaatctattttctatctttatagatttgcctattccagacttttcttataaaagtaatcaaaatatttgcagtcttttgtaattaccatctttcacttakcataatgttttgaaggtttatccatggtgaagtatgtatcagtactacttcatttctttttgttgccaaataatattccattgtatggatataccatttttgtttatccattgattagttagtagacattttagttgtttttgctttttggctattatgaataatgctgctatgaacatttgtgttcaaatttttgtgtggatatttgttttcatttctctggaatatacatctagaagtgaaattgctggatcatatggtaaatccttgtttataagtttgagaaactgtcaaatggttttccaaagtgaatgcatcactttgcatttccactagcaaattataaaggtcctcatttctccacatcctcaacaacacttgttattttctatgtgtgtgttttaaaaatggtttttatagccatactgatgggtataagatggtatctcactgtggtcttgatttgcatgtccacagtagctaatgttgagcatcttctcatgtacttgatgaccatttgtatgtcttctttggagaaatgtctatttaatcctgtgcccatttttcagttagattattttcttttcattattgaagtttaagagttctgtatttcatatacaagctttctggtataagtctcatatcagatttatgatttgacaatattttctctcagtccttgtattgtcttttcactttcttaatgccattgttgtgtgtgcttatttttaaaacaaaatctgatgacagattattctaaaggctagattttaaggttgatatttgttttcatgatgcatctactattatttattttcgtattttctgaaattattagttttttaattacagctataacattttgaacaataaaattcttaattttagtgttttccaaaccgtgctctgtggtacacaagatgctccatgactaaggtagattgagagatgttgtttgctttatttcttactctgagcacacaatattaaaggccatatgatattctattttaaaaataacatgtctagcccagcatttccaaaagccgttttaatctttttccctgaaacagctattaaacccaagttctgtaatatatacttcagaaatattgttttaatctattctctgaactagttttacctggcttgtaggactatctgcctttgttcttaaaaaaaaaaaaaaaaacttgtgagagtctttttaaaattctatagtcagatctatgacaacaaaagagactgagacawccacaagttatttctaccatgtttgtttaactcaggagattgaatttgatgtgttatatacatggtatgaaccaaacgcataatagaaattgggtcttctctaccaatcagatagttagaaagatatgcttttacttcagagaaaattcaaagtcagctaaagtgtgtaggtctgtttcttttcaatttccagggccttttccattatgtatttgctgcctaccattattgctactattccatgaaaaatcgcactctgtgtgtgtgtgtttagatttgtatatgtctgctcaaatagagcttaatggtgacatttttatggcttcaggatgttggggtggagggaattatcttcccctcatggtcgctttgtgtcagatgatcattgcttcatctctagaatcctatattgcttctggacagggaaaataggaaggcagaaaggcaaaagagacaagctagctgagttttcccctttttaaagactttccttagaagcttcacacagtgacttctgcccgtatctcattaaccaggactgtgttccatgatctcctgatctgtaagggagttaaggttgggggaaatagtttcctagctggacccattgccatctctatgagaaccagggttctgtgaataaggaagaagaatacgacgtattataggatggacaactagcatttttgtcacacaaggcatgggatgacagaaaattctgagagtgaagagctaaaaattctttactacttgtgtattcaacagtagaattttaaaaatcaactccttattgtagcctaaaccacctgggttcaagcaatcctcctgcctcagcctcccaaatagctgggactataggtgtgtgtcatcaggcctggctaatttctaaaattttttgtagacgtgagatcccactacattgtccgggctggtcttgaactcctggactcaagcgatcctctggctttggcttcccaaaatgttgagattacaagtgtgaaccaccacacctagccttattttttttttttcctggacaacaccaatcagttattctttttaaaaagcatgtattgaatcccttaacacgtgccaattatattccacatagcaaataagatccataaggtttctgctatcctgaaacttactttctaaaatggaagatagacaaaagcaagtaccggttgagaatcccttatctaaaagggaccaaaactgtttggagtttggaatttttcagatgttcaaatatttgcatatacataatgaaatgtcttggggatgggacccacgtctaaaacacaaaatttatttatgttttatgtctaccttatacacatagcctaaaggtaattttatacattttttaaattttctttataaaacaaagtttgtgtacattgaaccatcagaaagccaagatgccactatcttagccacccatatgggcatcctgtggcaaaaaaagtttcagatcttggagcattttggatttttggactaaggatgctcgaactgtaatgaaataattacacaaggttatttcagattgcagtaaatgcaggaaacacacttggtcatatgctgaagagtgacaagagaagatgagggtaagactggccacttttgttcacttaataaaacccagcacctaataccatgcttggtgcaggataggtgctcagtaaacgtttgtgttggatgaatggatagatggatggatggatgatcagtcacagaaagtgtcctgaggaagtgttayttgaagtgacacccgaagaatgaaaatgagctgacaatgctaagaaaatgggaaaatgtattctaggcaagatgaacggcatccaaacctttaggttatatcagtgaaatcaaatttaattctaaaacaaatgagaagccattgaaaggtgttacattgattatctcatctgggcttcacaaaaattacgtgaagtaggtagtcttattatttccattttgcaaatgaggaaacttaacctagaaattataaaatatccagattcacagagctggtaagaatgaaattgggatttgattataagaaattcagctcgagtccacccttaaccactgtgcaatgttgtaaactataaaagtaaactgtaacaggactagattgtttaaacagcaagtaaaagcctgaaaagaagatatctgccaatttaatggattcaatttttaaccacattgtctattagtgactcttatgaattgaatacatagcacagtttctcagagcctccactgaccatctttctctttcaaagtaaaaattgtctttgtatattacattatggactggattattataaaagatctagtttctggttctaatgaacgctgaaatatggaattgctaaaaagtaaatttagttagaataacaatagcttgatagaggaaaatcattacaaactcaagcggagaattccagtttagctatgcccttgaagttgttattatactttgcatataatttattgattctgaaaagttggatttgccatcttctgagaatattatcttgggcatatggggcacaccctgcaaccagaaacagcacaggaatagtcattccttcatgacaacttctacgaaagtgtaaattgaggctaacaggraaatcaccctattactcctgtaaagtgacgatagctttcagttttcaaatgcgactttctgatcatgtttgaatgtgtttctgttcatgtttatggagaaatttaagaattagaattgtgattcttaattctaattcttaaatttctccacaagtaataggaaactaaagaatttttctgtggtaatttcattaggaaaactttggctaggacatggtgataatgtgcagatattttgtttgccatgtcacattcttccccttcttttctggaatgcaatcaatggtgaaacatgttttacggtaaaacatttaatactccaaattgtgaataaagcaaagagaatgtgtttaatrtattttttaaatcatatactttctttaagaccctctcactcctaacataagctagagttttccgtttcaatatataatcaaaaaaccaagtatcctattaagtgtatattrttgactcaaattgacaaggacattggtaaccttccttttttttttttttttttttttttttttttttgagacagggtctccctctgttatccaggctggagtgcagtagtgcaatcgtagctcactatagcctcgaactcctgggctcaagcaatcctcttgcctcagcatctagaatagctaggactaccaggtgcacaacaccacacctggctaatttttaaaatattttttgtagagactgaggtctcactatgttgcccaggattgtctcaaactgctggcctcctcaactgatcctctcacctcagtctctcaaagtgctgggattacaggcacaagccaccatacctacccctctatttatttagtttttgccttcaatcaaggatacagtacatcgcatttgcttgaaatagaaaaaaagaatgagcaagtctctcggttcttgtacttgtggtaggaatagagacagagaagtacctggttaattatttctgcacctgcaattctaacgacctcagttaactacagttttaggtcatactttactcttcctttttttctatttcttcctttttccttgccacatcatctattccactttattttcttttattcctaaatagaggtctgcataatatatcactaagaggaatacatttgcaataaaacttttttctgcaaaaaaagcattggttttattgtaaacaaacctctgaaattactttcaacatatcaaatgggtcatggacccgtgaagaattgagggggaaggtcaaatttaggggcagagatgtactgtaaacttagtcaaaagaatatcttcaagtcttataataaattactttcttcagcatttaagaacttgaacacaaaatgcacatgtcttgttaaaatctaattgaaagtggaactaaagtaatttttggcacaaatcggctttagaggacaaataagaaagccaagggtcgcgtaatggggctagtatatattgtagtccgtctatgcttttctcaacaacctcccaaagtctagctgattggggagtaagaaataagtagcagggaaaatgtttggaattttgtcttttgctgaaggtttcttggcacttatgaaaacttcattgaatgaaataagactttaaaaattttgtaaaagactttttggaaaaacgtaactttcacattaaaattatataaaaaccaattcagtatttttctcatttataagacttaaaaatgaattcaatgttttaagtcacaccaattactgagatatattttttaaaattacctatttatcaattttaaagaccatttctaaaaaaggagtttaagtagagaatattcctttgagttagatagtttttggtatacgtaacagcatacacacacacacacacatacacttttaattttcttggacttatatattttaggcccataaatgtaaaccatttggatatcaaagcaatgtttatgtttttcagcacgtaattttaatgctacagtctgagaaattgtatgttgtttaaatgcaatacatcacaatgtttgataaataaaaataaaaaccgttaaacctatccaaatgcaagaactcmtaaatattgttgagttaaagcttttgatgcagctgaggctatgtctggattttattattttccctaggatttccaattttttctaagaaaggagatcaattttatagattagtctcctgaagttgtgccagtgggttcgtctgagttttaataattttctgtagaaaatagccttgaatgtgtcttttcacggggcatggtatgaatgaaacctaaatatatagggaaacagagatattagcatgatccagtcataaaacaacaggtgaagagctagaaataataaatgaggcctttattttattttttatttcctactcatttactcaaattgacataaataatgcaagaggtagtttgacaaactgtacaatacagatttatagtcacattaattggtgcttaggggtttgggtttcacctgaagttaagttcatatagttaataaagtcataatgccttgtttaaatatttcatgagaaaattgcattttgttttgtctactcagaacctaaaatctgttttattgtggttattttataaatatttgcatggaatttttggagtaagtttatttggtttgtttgttttttttttaaacaggcctaactatcaattgcattggaaatttgattgtgtttccaactaacaaataataatacacctggaagtgcaagtcctttccatattgaacagactctctctagcttttccttagctgatcttttcaaacgtttgctatttgggcctctctggccccaaagagtagccttttgctactctttacgcttgaggaagattaagctatcccaggcctctcataaccaaggggatccattaatattaaaatttagatttttccactgttaatgcagaaaaccattgattcagtagacttcatggtcatgcacatgcgttacatgttactctgagtaatgctgcatgaagttttaattacagattgatcaaattctataaattgtgttttggcgtggccaaggaatgggtttttcctattctagtttaatagaaagtcataatatatatcatgtgaattttacgtttctcaatgaattagattgcaacaatgcctaagtttgattatatacttattaatagtgataacaattatagctcacatttagtaagtccttactatgtaccaggtatataaggctttttaaacctaatgattcatttaatgcttacaaaaccatacaaattggatgctattattagctaagtcatggagacatgaaactgaggcacaaagacattatataacttgtcaagatcaagtatctggtaagactgaatatcaagtcagaattgggatttgaaccagtctggactctagagctaacatgcataacatatagcctacactttttaattattcagaaggtacttcaagactcctgtggtgcctttgggttggcagtttcagtattttttatgcttacatagagcataagatatataaatataaaacattatatataatatatattcaaatatatattttatatgtgtatatatatttccctaataaatattgaaagaatgcacacatgaatgagtggatgggtgaatacagaaatgaaaaatttgtattgagatgtgctaatagagaatttggtataactaaacatctgatatataatttatattttgaggtaactctttagccaacattttaaartatgattaatttatagtacttacgaaggattttcagagacattacatttttctgttatttcactgttttaaacaagatggagattagagggtggaaaatggattctggagaaataaacccatcatattaactataaccatgagttccttgaagacaaatcaaatctgatgtcttttctttytccttatgaatatacttcagtacgaaggacctgatacttagtttggacccagtaattatttattgttgtaagtagcacagtaagaataaaaacgtttatgatttgcaaccagccaacctatattttaatccatatttaaccactggctgggttatgttacatttctcctctcttaactcatttccatatccataaaatatggagcatatgcctctatggtttcttggtgatgaaattatgtattaaaaattataaaactgtaaaaaatatatctcaaaatgtgtttgtgttccatggaaaactgtaaatctctcttgaaacaaaaaagtttctataatcacatacttctagaaatatttcatctgagttcctttaaaacttcctcaagctttaacatgctaacaggtactgggactatccaaggagggatgatattttgcagaatttcacaagcttattttactttattaccatttttcataaaatacctcacaggaaaacttaagcatgagactgatgtgattacattattattaatagtctccaaaattcaaattagcaatagaagttgtaaaaatttcaagtaatcaggataaaccagatgtattaaatgaaaataatggaagctttgtaagattagtggcagcatataggtttagaggaattattatcattgtgataacagggacagatacagaattatggaaacattctaaagcagtatataggaagatcattatcagaaatagatagagaaattgtagtagagaggctagaatttcaaactccagaatatctgaatttgcctctatctgaagccttctcattcccagtgcttatgaaatttacactggctgctatattgaaatgctaagaatcagaatcagggatttagtatcaatcaagtggatggaatttagctagttatcaccaactgtgaaaggaaaaatatccgttaaattcagtcacaatgctatatatcaggctctcagtgattttttaaaggagggtcaattttaagaattctaaggaatctctttgttcctgctaatttgtcygaaggtttacgaggaatacaggagaaagctaaattgtttggggaacagtaagagatttagattctgagaaagatcctggaggaaaagctggggccagtatgctgaaaaagacacagtcctcttgccctaccccaagagtaaagggcaagaggtagtggctgccaaaaaaaaaaaaaacaaaacaaaacaaaacaaaaaaacctgaaaaaacaaaaaagttttgtggagagatatcgaatggatatttatatggctttttgctgtattttgtataatgtaatgatgtcctcttgtctccccatgaaatcgtcagtgaaatcaacatcacttgctaatacattgtagagtgggattgatttgaggagcggggagatgtgatgaagtagctgtaatagaggtattgtgtttatgagactgtggctgctagtcacatctgttttacccacacgaggctgatgtggtcttctagtttgtaaattatgatatgcaggcggttcctgccagcagagatttaaaaaaaattatgcaggtgggtaagtctttttcagcaccacctgtattaggtctttctagatcccaaatcccagtattgacgactggagggctgataaacagtatatggcaaccccaggaattctgttagcttctttggcctaagccccggaccaaatgcagacttccactcttacttttctgaagagtgcaaggtaattttgacattcttactccgttaataagaagagacccaggaaaggaccaccaaaaaaaaaaaagaacaatttcccaaaatgactagacaggtgctgagactggcctaaactatcagagatcttcccaatccagagcactgacctctgctagagcctgcagtcaggggagacatacagttcaggctcatcttctcacatggaatgctgcagagagcaaatataggtagcatagaaattaaggaaaaagagtatgccaaggaargaatccaatcaaacatgcccaggttaaagaagtgcttttagtttcttatcaaatcaaaaaccgtgtgctcatcagagtaaatgtggttctaaaaggcaacccctgctctcatgcattttgtgactcttgaaaaacaaaacccatatgtaaagggacaataaaattgtactatttagtatgactaatataagggtgtctttgtggcatgtggtgcatattctataaattcttgttgtattgaatggaattaartaagagtttggggacagaagaatccctggtgtattagtatttccctagataattttttcttgtaattttgaattaatgaagctaataattaacttgtagaccaattttatactaaaggaaaatagtaaataccaaatatatagctatgatcacaaagatccaatccctttttaaatttaacatagagatgctttgctgctcctaaggtaccattcctgctcccgcctcagagcctttacatcttctatttcctctgtctggcatgcatttcccccaggtttgtgtgtctggctctttatacaattatctgataaaatgtcacttttttcagaaaggactttttcgatctactgtacttatataaacttacctctgcttccagcccctaccatccattacccccacttgttctcccttcgtttattctattctaagcttctttatagctttatcatcacctggtatactatgtttctgtgtttrtcttcttccttcactaaaatataatagccaggaggcagagatacatcttgttttgttcaatggcatacagtttgtgcctagaacagtgctttgcacataatatgcatacaatacatatttacttaatgagtacatgatgaaatagaaagtggactgtgtggtaacctttacatccttatatgtatattagttttatatgtcttcagaaatatgttttagccatcttcagctgctgtaaaagaatagttttcttgagagtagtgcaaagataactgtggtgactattactttccatcgttatcctctttttttcatatctaaaacttctcacctctttaaggtacacacaaataataattttttatttcccatctagttacagtcctccttcagctttcatccctttagtaatagttgtggtgaattttttctcccgagaagcycctaaaaaggcgttcatttttacgtaaacaaacaacaggagaaaaacatataaacatgaaagcaaaatattttacctacagaaatatattttcagcaatctatttctcatgctattgttaaaaatatctctrcttggatagaacctttttgtttccatgctgacttcttctttgcttctcctgtgaactttttaaattctgtgtttggcagcagttttgttttccttggagctaagtactgtgtaacatactgttagctgaaggctgtgatgtagaaatttattattaaaaataaaagacggagagaagaatttattccataaggatcaaaatgacttagtgtcaaagcagttaggattttcaaaatgctttctataacagattgtgtttcttttcaaggaagtttactttgtttgccaggaataaatttaagggtcttcattgtgcctatcttggttaatgagaactgagaagagaagaaacattctcttttaaaaaaaattttttttagagaatttcttcatcagacggaragattttatttgccatttgcaggcataaccttggtgacctatatatccccagaccttctggtaagatgcttattaaaatgtcattacccagaggagtaatcataaactagccagagggtattttttatagatggtgagagacaaacattttttttctccctgaattaagtagttatgtactcttatcaactagaatatatttaaacttacttttatttatttttccagtctcaatctctccctctctgttttatgtttctagcaactttatgtaactaatcttaaaatcattagcattccttctccaaaaagagtatcatatcatcttaataaagtttctcttttcccagaattgcttaagtagcatgctgctattcatttctcttgaaaktttagtcaaaatgaattattttgcaaaaaggaaaattccacagtttctatttcttttcctcattgtctgtggcccattaacgtcttttatctgctactatgataatgtcaaatgattactttggtcatctgcaacttaacactaatcttatctgtttaattgaaaggatgttttgactttctctttgaaataatatcaacatcattttgcacttaattctgaaattcattgacctcaatgtgcaagctgtcttctttactatttattgtgaataaccatttttttttatttgttgtaatcacacatcargaaagggctagggagatgtctttgtgaaacatttatccctatggttctgtttaataggagtacttaccagtagctaaatgcctcattttattttaaataatctgtaatattaagtcagtttatcacactatgagtagttttttttaatggattctgacaatatgctgcttattgtagtctttcatcctttatctgagaacwatgtttttatgacagtaaaatattttttatacaaataggataaaaattcatatgctgtcatgcgctaatatgaagtttatccttacatctcccactctccaccccatgccccatctagtggccagaatgctgtaatcgtgggaaggaataaagctctgacactatgcagtccctacccccatcattgcctctttctttgcattaaaaaaaaaaaaaagaaaatacactgaaataataaatgctaaattttggctcagattattttaattagaaatggaagtttaatgataaacactttgtattcttcaaatccaaaaggagaaatatcctgtttacttcctttggtgctcttattgactgtagaacattacagtatctcatttgtcatatgcagagttcattctttttgaatatatttcacataggatgtagatttctgtaacattttttattactttgaaaaaagtagccatagtgtacattttaaaatactaccacattcttggtcagctcatacctttcaaatataatataaagatgatattaatatataaataagaatggaaaagaatttctttgccctgcatatttctcagtttgttatataatgctaggaaataactctctgatacataacacacttggcaaattttactgttttatgctttaaaagaaaaagtcaaatttagatagtgaattttttgaaatgcatcttacaagctctgatttgcaaattaccaaattgatcttatcttctggagtaaatgatgacccaaattagtctacattttgagtgtttttgttctttgactaaaatcgtcatcgttaagataattaatggcagaaggcagtgaattacatgctttcctcattttaattctggtcctacaaaaatgtttcctttttgacttactgtcatcatgaaatattctctcttaaatcaatatattgtggattataacttgtgtttgtaagatttatttacctcttttagttgtgataggagaatttaccaccttattttgatcctgttagtttaaactcattagcaaggaggataacagtgttaatagtcagcattttgtaaatcttccagaagattttgataaatcatttcactagaagcctattgctcaatttattgccactttaaagttgccaaaaataatgagctcatcttcctattttaatgtaaggtattgtcaatgtttgaaatgtgtcaagaattgtttttgatagttctagtgaacaactaatgtttctaaatcatactacttatttcattagttaattattgcttgtgaaccatattataatcatctttagtatcaataaatatttttgagatgatataatgccartaaatccataaattaaaaaattaaagcattaaagaaatayctactatgtaagcattcaattttatataatgattatctgggtcagtgtacccaaaattgtgtgctagccaaactacaattaaatcatcatgataattccaaggcttaaaacaattgactatgtctgttaaaaatgagtagcttaaaattcattaaattactttgttatgttttttacctattatactgtgaacatttcacatgttcttttttataaaggccttggaagccaaattttaattgctctatggtatcaytttgtataccgtaatctattgagtaatttcccttttgttggataaacaattagtagcacattatagttactggatttttagatcttagtttactggttcaaagggtatgaatttttaataatatatgtattatatatattttatatgtgtgtaaatatatatatacaatgtgtataaatatatatttgttatatagtagcaatatatatgcttagtttactccctgttttccaaatattcaacattattaatttgcaaatataataggcaatagtagtatcttgtcattgtttatattgaatttcttttacttccaataaagttaaatgtctttccatagatctatttattttgtaagttgttctcactcttccctcagttttttactagggttgggattctttcaaatttgtaagaacccttgatatcttgaagatattattctttacctaagtttactacagatattttaccaatgtgacatttgtgcaaatactctaaagttttatatagccagatcaatttgtcctcttttgtaataaaaaaaaaaagtctttaaaaaaagatttacggacaggattgacagattgatagctctttctcgattccgtgggtggtggtgcatggccgttcttagttggtggagcgatttgtctggttaattccgataacgaacgagactctggcatgctaactagttacgcgacccccgagcgggtctgcgcctgccacctgtgcgggggccggcaggaccccgacaagcagctcatgtgcgatgagtgcgacatggccttccacatctactgcctggacccgcccctcagcagtgttcccagcgaggacgagtggtactgccctgagtgccggaatgatgccagcgaggtggtactggcgggagagcggctgagagagagcaagaagaaggcgaagatggcctcggccacatcgtcctcacagcgggactgggacaagggcatggcctgtgtgggccgcaccaaggaatgtaccatcatcccgtccaaccactacggacccatcccggggatccccgtgggcaccatgtggcggttccgagtccaggtcagcgagtcgggtgtccatcggccccacgtggctggcatccatggccggagcaacgacggagcgtactccctagtcctggcggggggctacgaggatgacgtggaccatgggaattttttcacatacacgggtagtggtggtcgagagctttccggcaacaagaggaccgcggaacagtcttgtgatcagaaactcaccaacaccaacagggcgctggctctcaactgctttgctcccatcaatgaccaagaaggggccgaggccaaggactggcggtcggggaagccggtcagggtggtgcgcaatgtcaagggtggcaagaatagcaagtacgcccccgctgagggcaaccgctacgatggcatctacaaggttgtgaaatactggcccgagaaggggaagtccgggtttctcgtgtggcgctaccttctgcggagggacgatgatgagcccggcccttggacgaaggaggggaaggaccggatcaagaagctggggctgaccatgcagtatccagaaggctacctggaagccctggccaaccgagagcgagagaaggagaacagcaagagggaggaggaggagcagcaggaggggggcttcgcgtcccccaggacgggcaagggcaagtggaagcggaagtcggcaggaggtggcccgagcagggccgggtccccgcgccggacatccannnnnnnnnnnnnnnnnnnncgggtccccgcgccggacatccaagaaaaccaaggtggagccctacagtctcacggcccagcagagcagcctcatcagagaggacaagagcaacgccaagctgtggaatgaggtcctggcgtcactcaaggaccggccggcgagcggcagcccgttccagttgttcctgagtaaagtggaggagacgttccagtgtatctgctgtcacgagctggtgttccggcccatcacgaccgtgtgccagcacaacgtgtgcaaggactgcctggacagatcctttcgggcacaggtgttcagctgccctgcctgccgctacgacctgggccgcagctatgccatgcaggtgaaccagcctctgcagaccgtcctcaaccagctcttccccggctacggcaatggccggtgatctccaagcacttctcgacaggcgttttgctgaaaacgtgtcggagggctcgttcatcggcactgattttgttcttagtgggcttaacttaaacaggtagtgtttcctccgttccctaaaaaggtttgtcttcctttttttttttttatttttatttttcaaatctatacattttcaggaatttatgtattctggctaaaagttggacttctcagtattgtgtttagttctttgaaaacataaaagcctgcaatttctcgacaaaacaacacaagattttttaaagatggaatcagaaactacgtggtgtggaggctgttgannnnnnnnnnnnnnnnnnnnnnnnnnnnnnnnnnnnnnnnnnnnnnnnnnnnnnnnnnnnnnnnnnnnnnnnnnnnnnnnnnnnnnnnnnnnnnnnnnnnnnnnnnnnnnnnnnnnnnnnnnnnnnnnnnnnnnnnnnnnnnnnnnnnnnnnnnnnnnnnnnnnnnnnnnnnnnnnnnnnnnnnnnnnnnnnnnnnnnnnnnnnnnnnnnnnnnnnnnnnnnnnnnnnnnnnnnnnnnnnnnnnnnnnnnnnnnnnnnnnnnnnnnnnnnnnnnnnnnntgcaagtgcctttgattcgttccttctttctaaagacgacagtctttgttgttagcactgaattattgaaaatgtcaaccagattctagaaactgcggtcatccagttcttcctgacaccggatgggtgcttgggaaccgtttgagccttatagatcatttacattcaatttttttaactcagcaagtgagaacttacaagagggttttttttttaatttttttttctcttaatgaacacattttctaaatgaatttttttgtagttactgtatatgtaccaagaaagatataacgttagggtttggttgtttttgtttttgtattttttttttgaaagggtttgttaatttttctaattttaccaaagtttgcagcctatacctcaataaaacagggatattttaaatcacatacctgcagacaaactggagcaatgttatttttaaagggttttttttcacctccttattcttagattattaatgtattagggaagaatgagacaattttgtgtaggctttttctaaagtccagtactttgtccagattttagattctcagaataaatgtttttcacagataaaaataaaaaaataaaaaaaaataaaaaaagatttagatttatttaattttttttttatttcccaagataggttgagtatttacctggattttattctattttatatttacagttttgtctttttaaaaatttgtcttttaaatctataattaatattaccatttattataaggttaggctttaattattttttaccctcaaaagtctatttttctttttctttcttttttttttctttttttgtgagacagggtgtcactctgtcattcaggctggagtgcagcagcgcgatctcagctcactgcaatcttggcctttcaggttcaagcgattctcctgcctcaacctcccaagtagctgggattataggcgtgccccaccacgcccacctaatttttgtatttttagtagagaaggggtttcaccatgttggccaggctggtcatgaactcctttttttcattagttgaataattcatcaaatacaaaatatttttgatgttttcttgcttatattttgttagcacacatacgtatatttattccaaattatttcattcatttgcatttttaatgctaaaccattatccccaaatttggttaagttttataatatatcttaataaccagaaaggtattttcatcacttgtaacattttctaatggattcctttcttttgagatggagtctcactttgtctcccaggctggagtgcagtggcgtgcgatcttgggtcactgcaacctctgcctcccaggttcaagcaattcccccgcctcaacctcccaagtagctggggctacaggtgcacactaccacgcctggctaatttttgtacttttagtagagacagggttgacccgtctggtctcgaactcctcaccacaggaaatccgcccgccttggcttccctaaatactaggattacaggcataagccactgcgccccggcctctaatggattcttttttattgtatatacttgaggtgtacaacataatattttgatgyatatttacaatgtaaagtaattactaaggtcaagtaaattaacatcgatcgtctctcatagttttaactttgtgtttggtgaaatcacckaaaatctaccctcttagcaaacttcagcacactgtataacatcatgaggtatagttctcatattctgcrttgtatcgctacacttattcatctgacataactgattatatatgtttatactctccaatgaaatttatattctttcaaaattaaaaatactgttagcttttgattgaaatctagttaaacctgaaatctagttaaatttgtttgagtagaattgagcactcaatagtttatagaattaagtcttctttaccagtagcactgtatgtcttcagtaaacttttaccattttctgtatatggttatcaaacatttcttgataatattcaaaggcatattatttttgttgctattgtgaacagttgtttgttgttaagtctacttaggagtcattgctgctatacagaaaagctaataacgtacataaattcatttatagtccatcttattggtgtgctagcttattagttgtaaatacttcttcagctggtactgatgactaataagattactgacagatgaatggagtttcatttctctgagtcaatatcttttatttccttaatattcttaatgttaaatgttattttcaataagtaaatattcttctttgtaagcaaggtagctcagggctattaccaccataggaataacgtgatgatattttataggttattattaaaaatctacgttttgtgactatgtgggcatatttcatattaaatatttaataattttactctttagaactctcaagatttttatagttttgaaggaggattaaaaattattgaactgatttggccttctggttcttatcatttgcggcagtagatttaactgcagtagtcatttacccagaatattttcttaaaaagctaaaggcttaataatatgcaaataaagctttacatggtttaacatctatctaggatgttcctgacagagctacacagtagcttcttttatcacacagtgatattaaaatactctcaaaatgattagaagttgaaatattagctatcaaaccaggagtttgctaytaatttaggtatgttaatttattcatgatagctatttaatatattactaataaagattggaacaacctgattattctttaaaataaagaagaaaaatgtttgtcaggtaaaataatcatttaacttattataattttcatctttccagctcatggggcattcagaatgggaccacaaacgagggccaagaggatcacaggtaagtttcttttccttttctttttcacgtttcgtttcgtaacactttcagccacgggttttctaaaactcaagagataataaaatgtagagcgaggaagaggcaaaataaccatgccatttgtttttatttaagttaactataattaaagtctggatttcaaatcccaaaggcagatgccaggatattccttctaagagctttctggtatcccagattggttgtgtttatatgaatatagattttatattcatcttgtctcggcagaatacattttgatcagcaacccactctctttattcatttcctttgacaatttttccgtgtattttcttttttcttcagcttcctgtttttggttaaatattttgaaatataatcagactaaactctgaactaattacaagattttgtctctaaattaactctcttcatctgagggaaacagaaagatgaaaggacctattatttttgaaaagaaacaaattctaagtctttctrtattaccagagtgttttcattgtcttgctttatgtcttaggcaaagagaaaagcttccatgacgcatttatgctttttaatgacctaattagacaatgtggatttgttttgctttcataattactttccctgatggaataaaggctgagctttacactgagaaaattatttctcctcctagagcactttgtgaagaaatgtaaaaataatttctctcatggcaggctatggttacctgactgtaaacatgcaaaataaaaattaagtgggtggaaatttttgcttctattgcacacattttgcatttgctactaaaaaatatataaattacaaagggcagttgaatgtgcaatactgtaaatgaaagttcattggaaagtgggggcttctcccaagtgtttacaaagctgatttgttcttgtgttgtcattaaacttgtgtgaataactctatttaattcyggtcactaggaaaacaaaaccaagtcaatcaattgttttagttcacattttaatgactgattttatttctgtccagtatcaatttgattagtaaataatgtaaaccaattaaattaggatcatctaaaagaatttatgccttactttatttccctcattcttatctccccttcattttctctgaaaactcttcctctgtacacatctataaaattttaaatcaaaatttgctgcaaggtcagtaatgaagggattaaattaacatagagtaaattcttcatgattcgaaaccagtaaaaatgtaaagataagtgcaaataagaaggtccatggtttctgatgattgccaccaaaacattttgatattcaaaacatgccaagcaagttgttgaggacatgtctcttcaaagcaagggtagtgttatatatagaaaattattgtttaagatatacatcatttactctctattttgcttactttggtataatttatcttcaggtttagattggtcactatgtcaatataaattgacaaaannnnnnnnnnnnnnnnnnnnaaaaaaaaaaaacctcacaattgtacagtatggtttttgttaactttcagtataaaaaggacaaaatttttaaaattccaaatattgcatatagctagaaaatgtgagaattccacatataaacaaaagctattttcataaataaaatttgattatatttgaaagcctgaggtggttctaaaaagcaaaagcattaaaatcggcttgcatgaattaccattatcaacatcaagtcttttttggatctcttaaccagcaaaatagctattctaaatatagtatacctttgtcccattttgattcctcaactcagatgaaaactgtcaaagtaaaaaacaaacacaacacaccaaaagataagaacaataagaaccatagcaaaaaacattaaaaagaaagagaatttccaaagaatttggaaatttcaggtagataaattaagtcttaagtaataacctcttatctgatttcaattccctgctgacgaaataataataataataataataataataacaataatgttttcatgttttggataattgatcccttcttttattgctattatctccttggtcaatatgtctaaagccttccagcttttcaaggggaacttcagacaagttgcacttgaacacagacctcttaatagtttactccaaagccttgctcaagtcccatcttagttaatttagaactggtttctaagcacttcctatgtttacagcactgtggtgggtctaactgaagacaactgaaaagacaagtatactgctttccaagagctcacaaattatggttggaaatacagcaatatttgtatatataattcacatataaggcaatctgatagacgcaacattacatacagtatgtggtgcatgatgacatatctgtgaatgacagtatatatgatggtggtcacataaaattataataccatgttttcagtatgccttttctatgtttagatacacaaataccatttgttacaattgcctacatttttcagtacagtgacatgctgcacagatttgtagcctagtaacaataggctacagcatatagcctaggtgtataataggctataccatctggtttgtgtaagtatactctatgatgttcccacaacaaaatccccatcattaagtgacatatatacaaagtgtaataagactatatatatatattgggaggccgaggcaggcagatcaccagaggtcaggagtttgagaccagcctgtccaacatggtgaaaccccgtctccactaaaaatacaaataatgataataataataataataatagtaataataataagccaggcatgatggtgggttctgtaatcccagatactcgggaggttgagacaggagaatctcttgaaccctggaggcggaggttgcagtgagccaagatcatgccactgcactccagcctgggcaacagaacgagaccccatatcaaaaaaaaaaagactgcatatatacaaagtgagataggatttaggtggaagagtatttcttactccctagtagactaggaaatacctctgagaagtgatgatgtctgaggtgtggctttaaggatgggtaagctttcgaaagtacagaggaaaaggtggatgaaaaagctttggtaaaagtctgaactgagaagagtgtgggacacctttgaatatatgtgaatttttttataacttctgtataaatgcttttggatggcaactcttacagcaattactgtgaagggataatctggagaatgctatactttattgactagataggcagaggaagttaagagggtcaagagtttgaaactgagtactctaagaattaggaccattaacacagaacagtttagatgaaagatgatgacttcagggttggcaatattaagtgacaagtgaaggtgacaattccaaaatgaagtttcaggcacatactcgaggcctgattagaacaaagggtgtcagtttgggaatgctaatcatacaggagataattgagctcctccagtagataggcttccagaaaaatattaaaagaaaaaacagaataaaagtctgatttttggaaaatatgctataaagactagaaacaagctgaggagggagttaatatgagtgtgcatgatcttactagagaccaggtggaggagaaatgattcagaaccaaaagtagttacaccaaggagaggaatgaaatcacagaccaaggttcaagaaaattaaaaatgtagcagatgtctttgggtttagtgattaggaggacattagtgaactttcaaaaaacagttttgagaaagaagtggtggaaagaagaatatagaagagaatagtgtaagataccagaagagtctcttggaagagctttgttttaaaagaaagttgggattgcagaaagaggtggcagcaagagtgatttatttatttacttacttatttgtttatttttaatgctaaggtgagatgtgtgtcttaattactggcagatgaaaagaattagtgtggaaaagaaaacactgaaaattctcaatagtgagctgattcaggaccgaggaaatggtgcggttcagggaagggaatgtgctttcttccagagtggtccttttggcacttctttatgtgttttcctcgccggaaacccacccccacccctaccccataccagccatttacactatatcagagaaactggccctgtttgcaaatgaaatactggataaatccaccaaaaagtacagatgggtaagctttgaaaagaaagtagaggccaggggcagtggctcacgcttgtaatcccggcactttgggaggccgaggcaggtggcacctgaggtcaggagtttgagaccagcctgaccaagatggtgaaaccccacttctactaaagatgcaaaaattagccaggagtgatggcatgtgactgtagtctcagctactcgcaagactgagacagaatagcttgagccccggaggcagaggctgcagtgagccaagattgcgccgctgcactccagcctgggagaaagagcgaggctctgctaaaaaaaaaagatatttctaatagaaagagagaaaagaaaaaataagaacagatattataacattaaaaggtattatgaaccgattgacttcagttttcttggtaggattgaggatataatagtgaaaaatcttgaatgctagaaaacatatggaataaatattgttttagatatctaaaaaagggaacttgcttgattcctgcccagtacaaagcagagagctgtgtcagatgtgagtgtgctagcctgcaagatgaattttaacatattttactttgattcgcaaaacatggatatatgtcaggtacttttttttagcctttgaggaatcagaaatagacaaaacgttggcatctagcagcatctaattttttttttaaagtcaaccttaattattgctaggatagagttaagcttcccctggcttctcccgggatacttaataaataagtgattttctcaaatttccctttgtatttcaaaattgtatcatatatgcattatcacagaatttaagatgcaccattcatatcaaatacttgtcctatagaaaaatacctatctctcttctagcaaattccaacccttaattgcatatgactttttagacgcagcaagaatgtcattcaagctgacttatattactttattctcagtaattctctttcataatttgtcagctcactcatagctttctggctgatttttcttctttctttttttaaaagtatataactctcaaatagtagatcacccaaatgtaggaaagatgctaaatgataaataaacttccagcagcatgcagaactcctttgtctggcagtgttcccagtaataccaaatgaagtcaggggatgaaattctcagaaggcaattacttgttgttttttcttcatttttattttttattcttgaaggaaaagttttccagtgggaagtaaagagaggcaacagaaaatatgctttttttttttttttttggagacggagtccggctccgtgcccaggctggcgtgcagtggtgcgatctcagctcaccgcaacctctgcctccctggttcagcgattctcctgcttcagcctcccaaggagctgggaccacaggtgtgcaccaccacgcccagctaatttttgtgtttttaatagagacagggtttcaccattttggccagcatgatttcgatctcctgacctcgtgatccgcctgcctcggcctcccaaagtactgggattacaggtgtgagccaccgtgcccagctgcttttttttttgttttttaaatgcttaaaaacagtaggaggacattccaaggggccaataatttacttatcacttagtggaggctccttgtggaaaagattagttcaatttgtgaatttgtaaacatcctaacattttaatattcttggaaccctcaggcctttatttaccaatagtgaaaaactagcaagtttttagttatttagtatattattggtatttgactaccagccagactgtattagctggacttaaaagtacttacaagaaacaaatttttgtgttgtccatctggttttcaaatgattgaagtctttctttagataataaaattctggtttgtatgattctaaataattcaagtattgtgtgtaaaatactggaagatagctgagtattccgatggaaaaaaagtgattaaatgcacactagactatcatcagtatgcttacaaatgacccatggcctattttggagcaggtctttagtggtttaacaagtcctggaggcaacaaattgtaaaaattctagactaaaagcaactacctagatcagtgagcctttatagcataatgttaagtctcaaggatgaattttgatgaggagtcattgtgctttacttttttgtctgtaatttcaagggaatggatctgattgtaatacctactgaagttgattaacctaatcatttgcctactaatggcctgatgcagtgacaggtcacttcttttctaggttaaatcatttgtttttgataagagaatgtggagagaaatttaaatgccttttcatatttatctggagtaatgccatatatatttattgaagttaattccttttaatacattttggaaagatgaccagccgtatttcccaggaatttgttccaagggattaatgtgagcagattgggagctcattattacgtctctcaaatgtccgacatgttaccagggaataatttatgccctagagctagctgccagtgctactttttctacaaacatagtgtctttcacttgcatttcttcctcctttttcatttttccatatatcaacctaacaactattaatattcgttcagaaatttttccaataattgtttaacttttggcaactctccaaagacagtttggttttggggtttttcgtttgcttgttgttttgagaaatttgtttaaattttgcttatactaacggggaccacacaaaatatatttgcctagggcctcacttagtgtagggatggctttgtcattgcatgtaatagtgacaggaagggacctaaatatcatatctatcttctccattaggtcttcctatagatatttaaaattttatcctttagtcagttctgcactattggacaattattttttactcttcccccactctttgaaattgcttttatttagttactgtttagtattatgtctttaatttgcattgacaaactgcaagacacagtttttagcaaatctatcatagtagggatattgctgacaatcatagtagggatattgctgacaatgtccacagcacacacagtgtcaagaggatggggagacatttctctctgtcctcagagaagggaaaacagtgtttctctttaacaactgaacccactagtatattagttctctagcatccctggtctctacctagtagaggccagaaacaacaccctcagtccccaaactgtgataagaaaaatgtctctagacattgtcaaatgttccctgggaatcaaatttgcttctagatgaaaaccactgaaattacagcataatctcattgataggtgtatggaagatagtaaataaatatttagtgattaatcttgacactttatgtaggaaaatgagaacatgtttcttcaagcatttatgctttcaggttttcaggtttcatctttaagtctatcgaatagaaattttaaagaacatattcatttcattgtgaagtagttttctcagagtggaattatgtccaagaaatctaatggctaggttaggggggaatgtactcttcccacacttacacatttaagtgattcgcaggaggaaagagagtttggctctgtcctcacagtagtttcatggaacttctgtttcagggaaactgatggatgaccttcagtaagtgactctttattacaggccctggtctcttaaaagaacattgatgaacaggaatcaaatccacagaaataaaagggaaaattgccactggcatttatgcttttattgttttccccatgtttatagattagtagacatgttgtttaatacttattgaatgaccctcttatgttggggcctgtggacatcatttccatgacatgggcactaccttgtgtgtgtttagccaaatcacaacctgtggtactttatttgaaacgaaacaaagcaatcaaataaacaaccactgataatagatgtttctctgcagggactgcagatagtttaagcaatagttaattttactaagtgtacaaaagcatattttgagagagaaataaaaacaaaartaatacctattactttaagccacagtttctgaccactgttgcagttgtgacttttcttatattctttcccccagatagcttatagtacacattaagaaaattaatgcaagtattttgcacgtacgttcttgtaaagcaaatatacacgttctgaaaaatttccagctctcaagttttgccttccacttgagagaataacaggagaaaaatatgctaacttgataacagttaattttatctttgaattgcaatatctgacaaagggaaataatttttatctcacgctgggtgattttataccatcagcagcattgagtaagatcttgttttttattaatcctgacaacataccctaaaagggaagttctgtgggtggatttttgatttttacttcacttatagataaaactgataaaaaaagattgtgccaaaaataatcagcttctcatagaagattaaaatctaagactaggatgtattaactagaacaaataatcagatatagaggtaggtaaaggtgatatagggtggaggaggttatatggagtagtaaggacagttaactggagagggtgaattgaggcaaagaaaacgggaaatgttgatcttttaagatgaatattaacatccattttcatatactaccaaaaaaacacaggatacaggcttttagtacattcttggtacaatttttttttatttggggaaattgaatgttttaatttcttattaacacatatccaggctatatgtataaatatgtgtttctaatagcattaacatcttatttatggtacaggaatttttctttacagccactctagggaacaaactaaaataytgtttaatagcattcctcacaagattttatattctcatcaaaggtgctgattttcttacaaagttttaccttgggagaacaaaggtggtttagcagttatgttgtcaacattaagtgattgtcccacgttatgtaaaattcagccatcatgtaaacatcagtaaacccaaagttaccagggctgacaactacaaagaaaaagcctggaataatattagcgatattaactaaaattatcttaaaagtcacaaaaatgaaacttcttgtcagatttgattttctagatcacagaactttgtttttgctttttggcggagtttttttttctccttttttggtggtgatgcattgtgtaataagcgattcttggaaaactcttaagtgttacaagttaaagcttattcttattggaaatctgcaggttatcaaacttgcatcaaaatagtttgctcgctgagttctgtggtgttgtgtttaaatacttctgggtgacaatttccacttggatctctacaactatttccattttagaattttgtaatcatattctttgttttcaaatcattttaaccctgaatttagagaaagttgtttacatagtatcagcgatacacacttaaaagggtatttttttttttaagtttaggaggaaaaacctctcagaaaattgtgggtgagacaaacagatggagtagaaatcacaaaaataaactacatcatgatcagtcaggaagatgtagcgcaaacagatataaaagctctagttctcaaaggactgggagcagaggagaggaaagaagttgtctatcaaagatgatgattggaaaatatagaaaagaccatctcatgaagcaaaaagaacatggccattgaagccatgttgaagttagaaacgtgcagtgaatkttttttttgtttgtttgttagtgggaatgaatgatgatttgggtgaccgacaggtcttaactccacttttaccactcattgtccctattcaggtgtacggtgacttagtgccataactttggtgacatttctcttctggtgcctcaaaaatatggtagtatatgcacaattattgcattttcaggcctttgcatgagtttttaaagagtactccaattaactataagtttaggaaatgtaatcctaggacaatttagttttctttttcgtggagaaatacagcatgacttcaaacaagttttgctaaatagtgaatttgcagcagccagttttgttttatagtgattatggcaaccttgtgtatagtgaatttttaattaatatttctaaaataaatgaaaacattataatttatgaacttacttaagagtttcatttattcaagtaagctttgctgaaccagtgtgtcttgaggaaatctgttaatccataataaaatatagcagcccttgaggaattagtgaaattatatctaaagcatgaataataaagccaagaagccttttgttttatttatgctattcccctgctttcaggcttttctgttttgaaagcgtacagctaagttgagattcccaacttttaatgtccatgataccttattgtaggacagcatattattactttgactgtaaactgaaattactggatgaggaataatttgtcatgttgtcattacttaaggagaagatagtatttaaatattgactttttcatacaggaacatgtgttctcattctctaggcatgtgactactcccccccacttcctcccttttttcttttctttttttctcttatcacatggaacttttgggctcaggagtgattctgtctcatgcagcttagggatctgaaatttacataaggactttaatagaagcttatgacacatgatatgaccaggcttttcactatgttttgccatttatttggcttaaaatcaatggaacaaactgaacttggcattactatttctgttcaaaaagaagaaaaatatataattttactgttttttatgttttggtcttggcactgtggcttttgtttatggaaaaagacaagagaggaaaaaagcattattttaacttcacatgataaataatcataccaaactgatatttccttaaaaagtatttgttcgtttttcttattacaatgagtattgctagtaattcagtgcaagtttgaaatgatatactggtaatatcttctttaaatagcattataggtttaagtacatcaccaacatcataactttatagagatattgcattagaattcatctagtttctgtacttattcatgaataagagatgcttatgtagatgttatttcttsttgacaaattctattagcataaaataaaagcattaatatttacttttaataaaagtcataacatttagcgttaagttcctttataagtaagtgctttatggacattattaactaatttaaaacatcaactatttttatctggagtgaatttctgccaatattaattaggaaaaatagggatataaataacgtctatggcttctaaatatttaaaagacattctatgttcgtcattttatgcactggtggttgtggaacttttaatcagtggatacagcattggaagtaatatttttgggaatgaacagtgttatacatattatatgcatagctagaagcataggagaggctgtcatttgttatactagatatcaaattgttgaacccgtctctcttttcatgtgacacaacatttcaaacatgcagcacagtatagtgaataatgtacaaaagctaggtagatttaatgaatattaaaattttctgtatttgatgcagtatttttgttgatagctatacgactgcttagaaataatctcattaaactttttcataatgtatacattattcccattaatagatatatacttcattaaatttattttactatgtttgaccttttgggaatttagagaatatggataaagaagtagtttagagagcatggaaaagaattagaggaaatggaaaggattaattttcaaagagacaagcaaaattggttgattttaatttttaaaggctgagtacattgataaatgtggatacaagtaataactattttaataccacctggaaaaagctggcatatggccaccacattaataaatatgtgtgtataaatgggttattctaaatgaatgagtgttgtcataagcatgccttatattaaaaataaaatcattatctttatggagatataaaaaaagtaagatattttattaacattattcttttccaaatatgctaactttggtaaccacatttaaagtctttttgaaatcatgttttaaaaaatcatccctatgatggtcaccagattaacttcttaatatcagcttcatttagagaaactatgaaattggaaaactgatattatgtattgcttcactgtcttctacaaatactttctgtacattgtatataaatcatgtgcttaaaagataaagatgttctatatatttttattttaaaagtttatttatttatgagggaattagggttacaatagtatgtctctctcttctttcataaccttgtaaggagtgtcctgttcgcagcagaatagtttttgcagaacaaaatcacaggataagagaagaattgtaaaacccattaaggcattaccctatttaatatttttatcattaattaatatgcccctcataatgcacatttacattttgacatcaaaaagaagaatatgtagctaatgtatgaatgatagaatacagatttagaaagctttctcattaaccttcagttaaaatactaaactaagaagattcaagaggagaaaataaaattttgcacttaagtttttaataaaacttcagtgtgcaaagtacctgcgtatttgttcataagcaaatgaagaaacaaaaagtaagatttaagaatctggattgacgtcaagcccaatatcatatggcttttctaacagcaagtgccactttgggcttcactaacgtatttatggcatacagaacagaataattaattcartaaattctgcactggccagatgacctctgcagtgttgaattcagttctgagtacataatttcaagaaggatattgaaaagctgatgcactcacataaacaataaatatgtctagaaacagtgtcccagatgaagtggaagtttagcttatgaaagagaacttatgatgaaaagcaagagagggagaaaaattgtgctctcttaagttatcaacacggtggctcacgcctgtaatcccagtgctttgggaggccaggtgggtggatcacttgaggccagtgatttgagaccagcttggccaatatggtgaaatgccatctctactaaaaatacaaaaaattaactgaatgtgatggtgcatacctgtaatcccagctactcggaaggctgaggcaggagaatctcttgaacccaggaggtggaggttgcaatgaaccaagatcatgccactgcactccagcctgggcaacagaatgcgacgctgtctcaaaaaaaaaaaaaaaaaaaaaaaaaaaaaaaaaggtgtaaagggagtgaaatttttctctttgtcwttctgtaaggtgatatttggacaagtgaatagaacacagagcagtcagattttgcttaaatataaggaatacatttctagccattcaaattgatttaaaaataaaataaggcagtggttttcctaaatatgaaataggttaaatgattgtgcatagagaagtgtctgttagagtagatgagccaacttcgtaagcattcatttttttgtttctgagcagtcatgaacagaccaagatatgaaaatcttaatctcctaaattattgtgtgtctcagtgtacctcagagaagagtcctgtaactatgctcttcatttaatggaaatttccaaatctaggcaaaccatgagtcttaagctcagatctaggctgtcttctgtacagactagaattgtcagctccccttgaggagctgtttttaaagcagtcattcctatggactagcagtatccattcagtatcagctagtgaacttattagacgttctgatggacagtgttttagatgaaactagaaaagtcttccttttaagaagtttcccaggtgatgtgacaagtgttcatgttatgatagcatcagcttaaatgtgtcagtatggatgatgattggatttcggtacttaaagtaatctttgtattgcttctgcctaaaattctagagttagagctaaatttctttactacttcatgtttgttcatccatgaattgtgggagcttatattgtaaactgatctcagtcatatattcattagtatggatgaaagataatgagaataatgtttgatgaggaaatgagggaaaataaatgtgggtactgagtactgtgttgaaagacagggaaacagcattgaggattgatacaggtctctcttctcacagcctctggcaccacagcaataatattgtaaactctaaggagagccatttacattatagtgtacatgaatgctgacccccctggagttgtgcagcgcacaacactcacaactgcatacatgatccttttaagccctttacatctacttctgtacttagaattacttccaaagcctaaacttgaatcctacattctgattaactctcaggaaaacaaaacaaggcctgtttttttctgactcctagcttttctaccagtatcttacctctctgtctaaagtagatcaaatatcctgtactctgggtggcatcatgttatttcactcctctgggcctttacaagtacattgtttcaacttttaataaatcttaaatacaactgaaacattatttgagtcccagctctaagcactgttttcgtaacacattttacatccataatgcatttatcatagaacttagaacactatgcaaaatttcccactagactaaagcttctagtatccaagtactacttcatttgactctccaatagtgattgccacccataagttgttcaggaaatgttgaatcaatgaatgagagtggggcataaaatgggaaatttgagcacacagaactttcatttaacctacttcactatttgactatggtgtggccttgcttttaattggaggatagctggagttgcaatcagtattcatgaaagcatgtttttaaaaaaatgagaatcagtctaacagaatctgaactttaaagaacatctcattactgattatacatggtgacgatattttccaaatcgtggagcttctactgggaaaaggtatgaataacctttttgttctataatgattttcaacagaaattatattagagaaggacagttgaaagccttttaaaaataaattcataaagtaatccaaatcaagtttatgataaactggctcagtgtatttattaaatgtatttttagttaatttttaatgagttataaaaatatgacctgggaccaaaaaacttcccagtaaaagttctagaatgattttttaagatgttacaaaactatcttagaatgttaaacagaatattttattaacttagaactgttcactaaactcccaaatgaaaaccagatctttccatctcagtaaaatactaaagtatcatgaaactttataatccttatctagcaccaaatctacatttatctaaagattgacaatgtccatccttctgcattttttcctattttcctcgtggattagtagcatatttagaatttttgaggtttcatgctaaaatttatgaaggaaaatgaaatatataataccccgtcacagtagaagggaatactaaacatctgttcaaagaataactcgttgagcagacaagtcatttaaatataaaatatgcaaattatacaagtgattttagtgctttggacaagattattcactgccacggtccttccaattctgaagttcgtgcatgtattttatgttttacttagaataagttatttttgtaaatgtatgaaataccaaatcagaaatgccaatatataatatcttccccccatactgtactgattggtattcatcagtaactaccagtcaaatgactagtctacatttctaaacacactgaaatttccaaacttgggagttggttcatttgagagtgaagtgcttaactggtgatacttgtgtctttttaaaaactgactttgatggtaagtttttcgtattttataagtaatttttcattgcttcctgtaacaaaacataaaagatttaaaataaaatacttaaaatataccttgaattaattaaaggaaaaagaaagcaacattaattgaatatgtatttttgccatatattgtgctaagtacttttttcacagaatttattttaatctacaaaataatttctgagaatagataatttatttactcagttaaggttttggggcatctcctgtgtgtaggcacagtgctggtggtgaagcagttccatgggaaacaggacagatgaacttttggttctcatgaagctcgtattctagaattctagatattattattatacctttacctatgaagagacagacttgaatagttgttatgacttgctgaagtcactgagctagaaagaggtaagactgtgttcaaatgcaagactaagatgcaagactgttttcaaatgcaggacaaacgcaagaggtaagactgttctaatttgaaaaagccactttcgtctcttctgtgctatattcccttccccaacatatatttaagatgtgatttatcatgaagatatccaaacactttaccatataaggtcaaaattcagtttttttatactgatgctaattatgatcatttaaaataaattcatttttatttaattatttgctaaacctgaattttaattagaaacataatccctatattgtgatagagattataaattgagtctcagaaatttaaataactacaaggtcaatcttcgagtagtgggttttccaaacagtcttgtaaatgtgcaggaaaacaaaaacatttcagaattgcttttctgacaaaaagaaaaaatggagatttcagcccacggaaatatagccctgcattttctgcttctaagcctgccttatgtaaattagatttattatgtccagtacatgaagaaattccatgccaaacctatatagctctttaagctttctacttcaccacatttgcagcgggactgttaagtaagttagtttatttggagtagaaattacctctgaatatgaactttggaagacttctaaaagtgatataacctctcatttaaccagcacgaggtccatgggggtaaaatttactatacctggtcttcttaaagctgcacatctgtgaaagcaaaaggttataattaagtttttctggaatttcatgaaattacacattttaaagtatagtcctgcaggacttcacattaactgaaatcaaagacagcctggtacagtggtgaagagaatgatctttgaaataataaaaattccaagtccaccactgaatgtatacgtgaccttaatgagatatttaacctttggaagtaatgctttttcatctagaaagtgagtcagtatctactttgaaagtttgttctgtggatacaatacrttggaagacattaaattaaaaagtatgtggaataaacactcttatttagatgatagctttcatcattatcattatcatcaccatcaccatcaacatcatcatcttgctcccaccaccaccagctccacctgtatatcatgctatacaagtatgctcagcatgatgagcccaggccttcttttctctgatccttcagaaaatgacttacatgatgcccttggaccatagaggatcaacttacaaggtcacatttgtctcactgtccctaatatagcaatatgtagcatcttctaatctttttctcccacaaacggcaagatatctcaatatcatcctacagtaaagggagattatactgcctcataatctattctaccaaaatgattgttaggaggatcccaccattacacagattttttgttcatactttagagatggcatcgaaaccaagcccccaaatggaaatatcttccttccaagtttctataaatgccattggacatactatttattgagttaactttgactacatgagtaagacaaattatttgtcttaagttggaatgcctgtttttcaagtaatttatgaggaggaatataatattatccacaaagtattccttaggaattttcagtgggaatagtaattttgatgtcctgtatcttatttttatgaaagaaattaagacaaagttgttcttactaaaattggatttactttttaatcgacattcttattagttagcatcaaacaaaatgttacttaagtaaatttcagcttacctaatttatcttatttaactctttcattatggctaatatagtatttggaattaagctataaaattaattaagattaagctgtaagaaaaagttctgactaaaattaggagggaaaaataaagctctgattaaataaacaattacagaaaacyaaattttaactctaagataaatttgccttgcaacttggttttgatgtacaatttgtgtattagctgattaggtaacttcaaaagtcatcagctgtctactggttacaatacagggaacatttgggaatctaacctattaacacataatttaataggtaacacatattactctctaagattgtttgggatcatctacagactttcatccaagtgaaaaagagttctacttcattctgagttaggtcacaaggtcctgttaattttagctgtttataaattttcactgagaagctgttctttcatcctcctatttttttttaagctcaaagttcttgatttaatctgataaatgagctcaagttacagattctaatctgataatttttagtttcttatgcacctgattgaaataagggtcttttttaaaaaaatgtagcacaaaacccaatgcaaaacaactaagaaatttggtcaatatttgtatatgtacacaaagaacttacacctaaaacctattgctatatcttaatttgaactttttaaaaaattgattaatttttgtgggcgcatagtaagtgtatatgtttatagggtacatgaaatattttgatataggtatgcaattcgtaacaggcacattatggaaaatgaggtatccatcccctcaagcatttatcctttgagttaaaaataatccaattatactcttttagttatttttaaatgtagaattattaatttgcatttttattatactaatctataaaatgaatactattgagagaattgcttaaattttagcattaccagtctttaagttttctaaatatggttttggagtgaaatattatcttacctttccaaagcaaggaatttgcaaacaagattagtctcaagtattaattgaagtatgagtactatttcatatgttacaatttttatattatctattgaatgttagattggcaggaaatagcaaaattgactaaaatagagatgtgaacatcctgaaataaagacagtactatatacaactaattaaaaacagagggatgagtagtttggcagaagcattaagatatctggaaaatgaaataagaattgccttggtcttacatgatgtgaaaggactatatccactactagcaataaacagaaaagagaaactgactttcagcattaagcattcactggtggaaatgaagttagacagttttcattttaagtgtgctcaatttacggatattcacggaaatataatttgtcaagtagaacaatcttcttgtcagttacagaaaagatattgataatgagaatgttatttatcttcccttagccatgtgctattatgggctcagattggcttctcgttttttaaatggaatgtgtccagttgacagaatacaagattcagcaacctagagagtaacatggaattttacaaagaaataaaaggataagttggaaacatgaagttttttttttttaaactaaaccaggtgaggtcccccaaatacaatgaagagattgaggagttagcaccctccaatacatcacaggtgcagcaaatgcaataccactgtattagaagtactttagagggggaaaatattaaatcttcccatggtaacaagtagaaactggaataaagactactcagattatacatgaaccacccccacccccaaacaaggaattacagaagagttttctaattttaaagagctggctagagccaagttacatgaataggtgtgaaacagtggtgctttgggcacccagtgactaggtgagcatggccaagaacagcattctagagcacgcaatccatgtgggtcaagagtgttgaaatatgatgaaatggtgggttaggtaggaatcactgatacataccttgtttgccctgctaaggacctgggaattcacccagtagataataaagaacaatcaaaggattttaagtaaagaaggtttgctacatttaatgcccctctcctcacagtgttattgaactgtcaataatatsaacacacattaaactgaaccgcatattcagtttaatgtgtgtttttgtataatttgaacaaggctggaaaccaggagacctgaactcagattccagctggcttagccccaaatgagctgggtaatcttggaccagtcaaataatctctttatgttcattatgttgaactagtcaaataacatctttatgttccagttttgytaattttaaaaaagaatgaatctagcttggattacctctactatctcttcttcttttattttgtggttgtgttctgtggcacagaaatggaatttaacacatacaggaaatgtgcagtcattttatttaccaaacacgggacgggccaggggagaagcatttgttttcttgtataattaagagaaagctgttgaaaatataaagacaattgaagtagtagttttcaaaagatgggaaggaagtagaggtgtgaattcggaaacaagctagtaacaaacgtaggtttgaaaaatttaccagagtgggagaggggcagtcctgtgagaattccactcatttcgttacatgttccagggagaaactggataggttagggtcaatgaagtcggaagaaattcttaaagatcacttatgcattaggtttcactttgtctctaggagtttcacactattccaaaagagtacaaggcaggagttagtctaatatgctccccagagaaggcttcataaataagctatattctttatgatctttattttcaattcaaggaccgtgtcaggatagacaaggtggtactgcagtattaaacagaccccagttctcaaaacagggaggttgatttgttgctccatactttggctagggctctgttctgtatcgtcctcactctgagacagagatggtggggcagccaccgcctaagacattattaatcaccgtggcagaaggaaggagaattctattgggtatggctttggcagttaagtgtcacgttctggagtaatacaactaatacacacacacacacacacacacacacacatgtagtactcactaatgcgcaggtggaaaataggatcatcacaataagcactatcatttgaaagagaagaaaagaacccacacaccatcactaacctgaagcaattccaaaatcttactgggaggctatttgaaagtcccttatcctagggctagatacatttttaaattattattattagatctggttctgcttcctgggagaaagcctctgtctatcgttctctgatcccctggtcccactctccctggtctccctgatctgattatcttctatgatcacctataaagtgagcattggaaaggatgccgtcctgggggctttgcagtttcatttgatcacttcctatatgtaagtctttaggagtttaagagttgtgttaggtactgaatagtgttcttttcatagtataatactctcaaaaccatagctccttttaaaattaattcagtacagttttgtatgctaataactacaccatcagttttattttttttctcggatgtacttttaagatttgctgtatttctgtgtcctttaggtgttgtgcttctcactcccaatttaggtgatgataatttcagactgtcaggctttgttgggaaaccctagaagattttccatgagaaaagaatttttagtctcttttccttgagttattctatccaactgaaaagatatattgagtcctataaccttaatttgattttgctcttaaacactttaatccattcataggatttataacgggtgtggtgaccacatcttgattaacccttactgaggctgagttgaaatatgcatttttagctcagtgcccttcccagttcttctsctatttaagaagggaaagcagttgccttttccgtgttcttggacctttctrttccctttttttttatccttgcaaacaaatctagtcttttctgagctcatttgtctcttataccttgtcaaatacagatcacagtaaccaataaatgatacttacatcctgttgtccattctctctggtagagctacaagtccattaggtccttcatctaccttcgaaatattgcagacagcagtgttaccatatgctccttctctgtgttccatagaccacctctttccagccactaatgccaggttcctcagcaccagctctcaggcccctcccctattgcctcatgtagttgggatacttcacagcaacagcccactctgggtaccagttctgaataactttctactctgcaatcagcagtatgtacaatgattcagagttgcgcattaggtaatgctttggtaaaaatcaaaggttcttaggctcaatcaaagggattgagaaaaatctaagagactgcagagaaaacaattgaagagccatgtattatagaaattggagtgggaatgagctctcacagaaagaaaagtaccaactgaaaggctggtcaagatttcattaattcacaaagaaaattacaaaaactttaggaaaaaaacctagtatttgggatgtacaaatgagaccatgcacgttagatcaaaatttggtaaatataaaaacaaacataaacataaactataatcaattaaaattgtatagttagcatcagagaagtatttctttaattaaattaaatccaccttgcccatgatagattaatcatgtaacaagccacctcttaggggattctgtgccagtttaaataatttcatgacttgggggtagagaattgtgaggagggaagaaagatttgctgggtaattcctgcagggttcaaaagacatggctccttacctcaaaacttacaacttgtattaaaaaataataaggcacacaaaaattaggaagacattttaatggtctactgttgactacagtagatggaagttgaagaggagaaaaatctgtatagactgaagccttcagggataatttcatataaactggtggctttaaaggataaataaaagttgtttggggtggaagagaagaaaaggctatttcaaaattcaaaagtcataaccacactggtaatattaaaaatattctcaggtccaaaagcatttagtcaaattaggactgtgatcatagcaatcaatgaactagtgtgcattttgacaagcaaaggctttctgattcttttctgtttctctttctattgatcatggggctaggaaaattgctacaaattatattttgctatttattttttgtgacatcaagagcaataatgtgtgytaagtcagaggaataaatgtacagcctagtattaaagtaatgctcctttaccccctctgcacactcgcatgttgctttcctaacaaacacgcaaatatgcaagcgtttcctagaagtgacagctaatggtataaattaacctcttgaatctggcattttcaaaactactgtagcacataaaagatagtggtgaaatatgaatagtaaatggaagaatgacatgtcctccgcctgctttcagaagcaaatagagggtttcactatcaagaaaattataggctctaggtttgtttaattactgagattttcaaacaacctttcttacaatgaactaatttgggtttgaggaaaaaaatagcagaagacagttctttctaaattttcttttaaaattatgaaaagcactcagaacattggacttaatcattaacagaataaaggcaaaccagaaatggtttatatagtttaatatgacgaatgcattaaattagaatagcgggtaaaaacttaatgccaaacagaaggcttattgccccaaattctcagactttcatgactttgtggcaaaataatagattttggttttggttttgttttgttttgctaaagggtcatcaagcagcacatgactaagtaatattgatacaggtagtggtatgagaaagttgtaaggaactaagacagagaacatgcttcacagcttagaaccaaatgtctactaccacctcaccatttactttttttctcatgttacaatttgttgtaaaccagttgaatacatccatagatgtattttcaacattatagacgttacgactttttctttgtttgaaattgagcatgtagtatgtacatgtacatagatttcttttcttttttttttttttttttgagacggagtctcgctctgtcgcccaggctggagtacagtggcacgatctcggctcactgcaagctccgcctcccgggttcacgccattctcctgcctcagcctcccaagtagctgggactacaggcgcccgccactacgcccggctaattttttgtatttttagtagagacggggtttcaccgttttagccgggatgrtctcgatctcctgacctcgtgatccgcccgcctcggcctcccaaagtggtacatagatttctaaatgtaaaatctatagagaaactgtggaacaccagaattataaaattgggcatagcttcattgactaccagtataatgaaaagaagctcctttcaaagatttaattctacgttctaaaatatgtattgtgttatttaggttgggatttttttttaattttccaaactcttagcaagtttttgttttctgattcagattcctctaaaaagaacttttaataaaaagacatttgtctccaaattaagaactaaggaaatatccttttgtggttaatcactttaaaaatgaatatgaaattattattatcgttattattgagactgggtctcactctgtcaccctggctagagtgcagtggcatgatcttggctcactgcaacctctgcctccagggttcaagtattctcccacctcagacccaagtagctgggaatacaggcatgcaccaccatgcctgactatgttttttgtatttttttgtagagatggagtttcaccatcttggtcaggctggcctcgaactcctgacctcaagtggcctgcccgcctcagccttccaagatgctgggaggatacaaaattattttgatggaaataacacatgctgcatgattaataattatattttaaaatattacagaatattgtaataaaattatagtgataaatatatatacgcttatatagtagataattaaatttagaatggtttgtcatcattgatccatgttgcaagctagactctgaaaccatatttattgcaactacagatattgatatttataggaatatgttttgagaccatagacttttttcatttttgtgtttggttttgtctatttgtaaatggaaacatttatttttaatgtgattcttgattgcactcaaaaacaagtgcactggtggagtcaatttatgatggagtatagaggtgaaagaataaagggaaatacatatagaaatagcattctcccacaatcttaatatgcagagggaaaaatagttaattttagaaataactgaaacttagctgttcttgaaaaactacccctcaaatgaactcttgaattccaaggaacaatttaaaaattacagactgattcccttatccttcactttttcccttcccccaattgtctgatgtctggctttctactcaaattctactcagttcagtcaagcccctgcccagaaacctggttagctggtttgttttccctcagaactcagattctgaaatactcccctctactttgyctcattcatagagtaagtttttgaatataaataaaaaactacacactgggtacagtatacactgctctggtgatgggtgcaccaaaatctaataaaaattcaattttattttaaaaactttattttttaaatcattttaaatctctcacaatgtctgtagtttcagtgaataaagagtttggaattaggaggtcatgaaatttaactatataatcttcccagtgatttctatactgacctcaagtagttgtttcatttgccctatcttaattcctactggtgatttcattaggaataagggttttgataagaatagckttaaactggatttcagtaatgagatggtactttgtagaagctaatggttaagagcacaacaggctgtagagttgcagactgcctgggatcacttactagatgggagaccttgggcaacttacttaaactctatgagctaatctgtaaaatacacataatattagtacctacttttctggatcataagaggactaatgaaataatctatataaagtgcatagactgggccctggtataagataaaccttcaacaaatattcatttttatttaatttactgttactaattggctttttttcattgatcaatgaaaattgttttaagtaactaatgtacctactttgatttttatagcctggaaatagtaggaaaaaaatcacaagtgatgtgaaatatgtgttaattctattatagaacaggaaagctgttccatttctatgaaaactgggaagtacaaagagtttgactgatgagggcagaactaatgctgattggtgaaggtaggtcttggctcaggttcagagagagccatctaatgaccacaaccttcaagttctagacgcacctactgtgtgaaaggtgaattcctttttgctttcaataaaggagaatccagagaaagactggttgtgctcttgagcagggtgggacacctaggaagtgtctcttgtcaaagacataatccttgattttgcaggtccagaaattcattttgtgaggtaacctagaaaattaaagtctgaaatattagttcattagaaagttacaaatgagtgagatgaaactttgtcaactcaaaaatacataataggtttgtcagaaaattacagattgtgatcaatagcccagggcattccaacaagcagtacatgacacctctcagaatctcaaactgtgattcagagagatgtagaacattaaatgaatgttatgctgtataagtctcctacctccagaatgtttctatttataaagtttagtagcattttccccaaatatcagaacctcctttttaccaggacaggatttatacgcattgatttttccttgggggttggcaacctgtacttttaatttaatgcagaacgccagattcttgattaaaatattttattttaaaaaaattgactataagactgctgaataacttctattgtccctttattacattacaatccttaggaataactcagaagaatatggctatgaatttgagatgttttattttgacccaagctcagacttgttcttaggcaagataaggcctgttctgtaaaaagtatccatctcaagtgtgccgttaatattctgaatgtcttccttttctggcaattttcattttttttatgtccttgctttccttccccttaaagcaagctacctgttttccgggcagttttactctctgttctcttgattcctctgttattaaaagaaaaataagtttcacttaaaggtagttatgattaggcaaggcactcagaacatttttcacttctttgtttcactatagaaaatacgttagaactttttgctcattgataaaagcttaaaagtacaaatctactaatagtacctcaatcttgttctttctctagttgctaatttgacattttcctctgcctgattatgtyggaggatttctcattttctatccctaagccgtgcacagctcataaaaaacagtagttgccaagtgacaggtgtttttggaaaacttgcttagtttatamgttcagagaagacattgcctctaaatcagcagctactaatgaccttttgttccagggagttgttagagatccagatgaagtcctgtaattgaagcatagtttaggcttagcccagagttggtattttccaaatgtactttgttgagtttttgtctctgccctaagcatttattcttggaattttcaagattcacacagtttcaacaataggttattcattttcttgccttctcttcccattctcatgttctgctttaaccaaaacaacgtaagttattgaatatcatgtaatgctagagtgtcaacagacctgtgtttcattctgtcctcaccatttgccaactgagagacctttagtaagtaacaaaacttctgtgagtctgaatctccaaatgtaaatggtaataacagtctcacttatcaagcttttgttcattattaaataatttgtgaaaatgtctagcatgctactagacagatagtatatgttcaataaattctcattgttctccttcagccttaagttatcttttgagtgctttattttttatttttcactcttttgctttctttagtaatgatatttcagttttgactttggttcataccttttcctttctgtgtcttcactgtgcttgccttgccttttcttctttcctttcttccacagacatatactgaacactcaatactatgctagacactgcggatacaaaggtgaatgatactgtttgatggagttcacggttttatgggagcatggatatgcacaatcaaatgtagaatttaaaatgaggacaagtgtactgggcatttgcaaagcaaaacaggttagcaaaggcctcctggaggagggtaatagctggagtaaaccttcaagggtgggactaaaccagtgcacaagggggtgtgtcttctgtgtaaagggaacatgttccaaaagcaaaaaggcaagaaacaatctgttaagaagaaaccacaaagatttcctargaagagagaatggcatgagttgagatggaaatgattgggaaaggagagttaagtcatagagggtctgggtttagatatgacaccctcccctttaaagttagtctgagcaaactttcaaattatacagcactcttattatttcttctgacctccgccaaacctctcacgtgccctttactaccttagctatttctcctagtgggactgcgtcatattcctcatgtaagttggagtaggattaaaagtttattagataaaagggagctcttaaaaaagatttagtcttaaagtgacatagtcatatatgtactttaaaatcacttctctaacttataggatgaatgaattttcacgaaaaacttagattctgtatgaagatggctccgatctactaaaactttgtttaacttgaggaactcagagctatgtgaaatttgtgaggaattataattggaaaataatggttttaaaggttattgttaatattagaatgtttaactttttttaaacaaaaagtgaaaaagcaaaacttaggaaagacgaaggcttaggtctacagcaatgtaactaagcaattccaagattgcttagtacttactacttagcctaatctttaatttgatacataatattgtttctcaaaaatcttttgcactgatagtggactaagtagcaaggatcagtaatatatagaatctcattcagatatgtatttttttaccttcaggagtggtccacttggttggcttttaatgaggccattttactctttgctgttaatggtatttgctcatttgcaggaacaggctaggtattgtatttatcttttcccttataaagaaaaaagtgacagtaggcaataaataacttaaaattagtaggctctgctgggcgcagtggctcaaacctgtaatcccaacactttaggaggtcgaggtgggtggatcatgaggtcaggagttcgagaccagcctgactaacatggtgaaaccccatctttactaaaaatacaaaaattagccaggcgaggtggttgcgtgcctgtaatcccagctactcaggaggctgaggcagaagaatcgcttgaacgcgggaggcagaggttgcagtgagctgacatcacaccactgcactccagcctgggcgacagagcaagactccacctcaaaaattaaataataagtaaataaataaaattactaggctcttctataccatgtacaaatattgggatgaattttttttttaattaggacttctggaaaagatttgtgtttcatagtgtttcttctagaattttactatttctttgacagagagtacaaacattcagttgacctgtttgtcttttgttcagtaattcagaaaaatatattttttatggaacatatctaaagcaaaatagcttaataggtatatcatctgatttcaacttcggaaaatatataaatgtacatctaagcttctagtgaatggttgaaagaagtatatatggtgtgtaagttcttaagccratggattcagcctagagcagcagacctgttcccagcattttaacactaggtgtttatttacagtgatcaaagtgagaatgtgttacatcagaagttagattaatagttttctttaacacctctactttcacaataaatgtgctttaagtcctgacatacagatagaaaaaggctttaaagttgctttttaatgtgatgatctatacaacctctaactggaatttgaaagctggggccaaataccactgcagctcagatgctaaagctgtttcttaaaatgargcagataaaaaatagagaaaatcttttttaaaggctactttgctcctttccttctccataactaaatgttggagctttctgctggggaggggagagcaaaattggaggtggaagagaaccatgaagaaggcggtaggggcagttgtttttctgtgcctgctgacgtcaacgaaattgccagatggcatttgaatgctttgcaaaaagacaggagccttttattacagctgtcacatggggtttcattcatttgcattcccagaagtggtctaaagctttccctaatgtaggagtaatgagggctctgtaccttcagagacccagagggccttttgtaggatgttgttactttaagtggctctgataagggacacaggctcagagaatgccatgtttcactgtcagcttcagaggaccataaactactcagcttcaattaggactataatgtgatcattcaaaaaatattctctccagaaggacttttcatggatcgtgacagctgcggaaacacattcagggggacctgaagggtctagcatggcagtggtgggctacagaacaaaaatgcagattccgtgaattgaccccaagactgaaaaataaccagtgcacaacagacctgagcatactacaaacagctttgctcttaccattttgccccatgctgccttgtcagcccctsctcaatatgggggaaaagtggacctttccgataatctggggccctatatgtaggagaaaaagaagttgaagtgccaggagctgctctcagaagctgaccctggggacacattctcargccaggctggcctgtcctgtctatacctcaacccttcccactgccagaagttttcatgttttacttattttttgcctggaatttgtcaagcttttaattcatggggttatcctttttgtttgtttgtttgtttttgagacggggtctcgnnnnnnnnnnnnnnnnnnnnnnnnnnnnnnnnnnnnnnnnnnnnnnnnnnnnnnnnnnnnnnnnnnnnnnnnnnnnnnnnnnnnnnnnnnnnnnnnnnnnnnnnnnnnnnnnnnnnnnnnnnnnnnnnnnnnnnnnnnnnnnnnnnnnnnnnnnnnnnnnnnnnnnnnnnnnnnnnnnnnnnnnnnnnnnnnnnnnnnnnnnnnnnnnnnnnnnnnnnnnnnnnnnnnnnnnnnnnnnnnnnnnnnnnnnnnnnnnnnnnnnnnnnnnnnnnnnnnnnnnnnnnnnnnnnnnnnnnnnnnnnnnnnnnnnnnnnnnnnnnnnnnnnnnnnnnnnnnaacaatatttttgccatggttgctgtaaattatattgttcatggtaagtaaattgacatattaagggtgacctaagctatgttacccagcttgttttcttcctaaccttcatctgaaatcaatgacctgataactaacagaagtagaaggtttgctggcaataggtctgtgcattatgctgagataaaaagcagcaagtataccaagagctttggagtctggagaccagggagacttaaaaattagttcacatggccgggcgctgtggctcacacctgtaatcccagcattttgggaggccgaggcgggcagatcacgaggtcaggagatcgagaccatcctggctaacacggtgaaaccccatctccactaaaaacacaaaaaaattagccaggcatgctggcaggcacctgtggccccagctactcgggaggctgaggcaggagaacggcatgaacccaggaggtggagcttgcagtaagctgagatcgtgccactgcactccagcctgggcgacagagcaagactgcatcttaaaaaaaaaaaaaaaaaaaggaaaaaaaattagttcacattagttcatatgaaacattacctagtttcaatcttatgcctacactcacggtcataataggttacctacagtgcaacagatctagtgaaaaatcttatgccaccttgtgagttggcaacgtattacatggatgtgaaggccactggcttgagtgatggacaaacctagaatagttttccaagtgctctattacgcagcatataaaacaaaggtactcttactatcccgtgctccaaatgcataatgcataagctcagccatggaatattttccaaatgtaaatagtggaactgctgctgagtgtattcatttcattctgatttctctttctgattcggcttcagggtttggggagatttaggagatgatggtgaagattataaaatttcaagaagcaccttccaacttcctctgaccccttttcttctctcaactgcaggggaaaggggcacaatcagtatctcgtatgtatgagcaagttccagacctgagtgagaggtggcatgtggtcagtttcaaggaacgagagaccaacatccaagaatagtctggaggagaaaggacatatcaagaaacacaactcaagctgggtgtagtggctcacrcttctaatcgcagcactttgagaggctaagttgggaggatcacttgagcccaggagtttgagaccagcctaggcaatataaagagccctcatcttaaccagaagaaaggaaagaggaaaggaaaggagaggaaaaggaaaaggaaagaaagaaaacaatctaaatggtcagagtgatgggaattttaaaaggcagcaggcacacatttaaattatacattcccaccctagacagtacaaagatatgcagatagaatggaaattagaaatgaattcatgaataaatgtttcacctcgggtatacttgggcctaaatcccaagagcatgtaggttatggtgggtctgtgatgtgtgtttcatgtttctccaagaataaaccttaggaaagctgtaatgataatagcattgtcccactttgcacgtcctagctccctgtccacttcgaaagtgcagagcacttgtaccaggcataagtattgccattgttgatagtataatggttgttattatcatcactactctgatatgttaaggtttgcctgaatatgaattaaaacaatgtgtttctgaatgtaactgcaggtgatagtcctttctggcatattatgcctttccccctaaagtcctaaaacagtaaacctaggtctcttttgtgtctcagctacagaaaaataatgttttgttaattcatctcctttagccacaaaataagtttttgattgtacagtaatatactatatttcatatgttgggcagtgctacagttcaaggacagtatacagccaatgtacatacttaactctgttttgaatgacatgaaatgacaaagaagtgaataatcaattgtcaggctaccttagggtcaaactgtcatctgatctgactttaataatactatttttcaattagaagaaattagcataaaatattttaggacctagcatctcaatgctcatggcttgttccagaatacaattacattttacaagaaagtagccacgggagtggcttcatgataacacacagatacaaccttctaatgccgaaggcaaattgccaaaatatgtgcattgttagggatcagaggaagaaagaatgatacactgttctgttctctcattttgagccccgtaagtccagtctaggggctggtagagaggtgttattcttttttctcagactcaaaaactgtaagcctacccagagaattcaggtttcacagaacttaggcattttaacttatctcatgagaggctgattaataaaccagaatgtcagtgtactcatttttcttgagaactgtcatagccaaacagattgtaataatcgtggtggctgtccagtattttgttttcaaagtaagaaagtctacctgggcaaacacatcagtgaataagtaaatgtatttataatttggcaaacatttttatgcacttcattatgataagcactggtgatataataaagggttaagtaaaatacatggtctaactttaaagaaagatctgcaaacaaataattcaagggcaacgattaacatataattttcaatatggcacagatagcagtatgtcttccaagcagaaagacaataattcatagtcttaggtaggttacattactgaaagctgataaattgcatctgtttaaagatgttagtttggatttaaggggaattttttttaacccttcaaacctaaggaagaaagaatattgtgtcttaaaagcatatggaatgccagtgtactaattacagtggaaaggtcaaaaggttgtatttgttttgagggaacagagagattgactctagattttcagaattacctttctttaaaggtataaattgtcatcctgcagtaaataaaaggaattcgaacaccatatccaatcattatgtttttaaaaactataatatcaaacgactatgctagcaataagtcaaaatttgttcactctatttttttccttcagtgttctagtgttttccaatgatgtatgtgtgctgttattataacgaaagccactttctgtgaagtgtccacctatgcttgagtactaatcatagaaaggagctctgaaaataagcagygggcctgtagtcagggactgctgaaaatgagggagagcatcagggaaattagtgcactgtgcctcttctttcttcagtactcctttaygttcattgctcatggggatctgtgtttgcctgttaattgagtgtgtttattgcaggcagttgccttaagtgacatgatactcagtaggaggttgtgaggactagaaggaggtcttgtttgaatacaaggggtgggggagtcacacttttcagaccgattagaataatgagattctctaaacagttgagaaccatttgtaagaatagcacrttgtgttagaaggcaattagagctcattcttttaataattaggttttttgagttcttacagtatgctgagtactaagattataaaaatgaacaaaaattgttctcaaatgcataatctggcaaggaatttagtcataattagcaatacaacaatatcataatagatgttgaacaaagtactatggagacttcgaggctgaagcgattaatttggtgtcagtttgagaatgaagctggaatgtttttatatattaaagttgaatcttgataatcaatactaaataaaagaaatgaagtggtaggcagaagtaacaccataaaccaaagcatagggttgtggcatcatatctgtaaagagaatccaggttagctggagggatgaggcattagtagagcacgtggagatgtaactggaaaagggcggcgggttaaaggttaaatgttaacacacttaaagacaaccaagaagttgaatgttgttccctaacttcgcggagccctgaagtggcagagcagcataataatatctctgcattgggaaaagccaagtttgtggcaggaagaaactagaagaaaaaaatattgtagccatcctcgtgtgatataatgagagatggattaaagcagggatgagaggctttttaaggaaaaaaaaaaaatgtcagtcttgcatgtaaatttccagatccactgaccaatttgatgttgaaggtaagaaagcaaagaataaatacaaataaaacctaagagtcaacgtgtccagttttggttagtgattttggttttagccaagtaggaaatacatgaggaaaagatttccaaagataaaatattttcttttggaaagttgagtgtgaaattgctttggaatatctgagtggagctgtccagaagctcgaaggagtggtcagtgttggaacaacagattagcgggtactgtattcattataacatagggtgagggctgggagggaagggcacagattaatgtggataaaaataataaaaaggaaagcagacagtgagtttgttctcaggctggaaaaaagctaggccagaagaagaggagatggctgtgcctgaggtgctaggcttcagtaatgtctggtggtgaagcaagaaaaagccaggaatgttgtcattagatattttgattaagatatttattaatattgatagagaattagtgagagcagaactctctttaagggctttcaaaatgttaatagattataattttttaaaaaatggttagctccttagagatggggtcaaagaccctaattttgttagtagaggaaatgctaacaatgtttttaagttgcgaggaaaaagcgaggaggaaaaagagaatgaataagaaatgcactaattaaaacaaatatgctgtctattagaaggatgaaattaaaagtacagtggtaggagactggtattaaccaaaagaaaaaatattatttgctcattgaaacaatagggaggaagtcaagaattaagaagtcctttctatatttagaaattcatatgaagccgaattaaagtcctcaataaagattggatagcttatttttgtatattttctgccaagaagaactggagaaaagagaattcatttaaactaattaggggctttttttttttttgctgagcctggtacctgagcaaaatgctgtggggttagaaaatgagtatgaaatgacgctcatctttaagaagcttacagaatccaaacatgtctgaagtgcctttctataagaatattaaatgagtagcattttgattattaatttgcctctaggattcagatatggatagtatgttgggggctcgcttgcagaaatgagtcacttggctaagagaactagctggtgctcatcactcagccctcagtaggttaccgtgtttggctgaacctaaggtaatcatatttttttattgccttatagcattctgaatataataagattataactaaaactgttctcctaaactgaagttattaacccagacttgtagatcgatacattataaaattttattattaccacctatttatctatacagttggtatattatatatatacagttggtaaaaaaaaattatgctgtattagaatattttcaactgtaaataaaagaaaactttacttcaactagttgtagcaataaagagatgttattatttctcatgaatagaaggccaaaggagggaagccttcaggattagtgcatttagtgaattcagcaatgttataacgcacctaggttttttattctctctactctgctactgtctatagtattggtctcatcctaatgccgattctacttgtgatccaaaaatggctgctggcagcaacaaactttcttctgaagaaaaaggatttccttttctagaagcatgaagctaagttcccctcatatctcattgactcacattgacttggcctacccattcttgatcaaatccctrgctttggagttgaaattatcatgattggcacagagagtcaatcatgatagccactgcatatgctttgaagacagtttagaattagacatttccaaatgtctttggacctatttgtcttaatatcagaatgttatcatagtccataggaaatttaatgaggctgtcaattggtccagcagccacaagacatgcttgatggatattcaagaagctcttataatcttttgagccagagtagaatgtagctgatgatagagataatatagcaagtttaaagtatttgtttgaagtattgaaactagtagggagacattttgaagctctttttagttagaccttattctgtcttaattatatattcttcagtttgccagcagggccagcacttgaaaggggccattgcatctgctctgtgtccatttttaagataaagctttgcttatttgtttttatggcatatttcaattaaagcattgccaccctactttagtccttatctccctattttaagatgaaatgaaattaaaattgactgaaatgatggttaaagacaaatttaatatcaatgtttttcctacatcctcctccttattttcagaaaaaaacatatttttaatcagtgcttgtattaatcttatgattataattttaaaagattatttttgaattcattttgtccttttttgcatagatctttgtcttaaagaacatgtgctgaatttctgtagaaattgactcttcatattccataaatctgttggtattaccatacaaacactctgtggaagcattgactgaactagcaattatgtctacaagaagaaaacaaatctatgacagaaatcctgagtgactcactattatgaccaaatgacttatttacttacttaatttcctcctttattcagcaacacattgttgctaaatgtggagtggggtatcattttgaaatacttcccatacaaaaccttgatgatcctgcctgacatctgcccrctaaatgtcttggtgagccaccatgtctgctgatcctaggataatcatattttttaattgtctcataacattctgaatataataagattacaactgaaaccagtttcttaaactgaagtgattaacccagacttgtagacagatacatcatacaattttatattcattaccacctaagaggaaaatgaagacggatgccttccttttagcaatagaagtctccacaagaatccacaagtttttccttccggggcaaaccatatgaacgatctggcttaagtatcagaaatagagagaataagtggcatttttcttgatggaaaaatattaatagtgggacctttcctaatacttagttctgggaagagtctaatttgacattttcaaagaagatgtgaaagaagggagtcaaccatgaaatcttggagtttactgatgatgttaacaagttccccttaataatctttatctacttaggctctcattaattggaggaagtgtttatttaaaaaaaataccgtatagcaaattggcaaggatattttcatatcattgaaggtaaatgactgtacataggaacggtacccagtatttagcattgtgaatagcgtagggcttcggatccagacyacctgggttggaatgtcatctctgcagcttaagatctttgtaaccttgggcaaattacataaccttttgtgtgcactgctttcaaatgttgaaagtcactccctttacaatgtcattgtttagatctcttgagttgcatcttagaaaatcaagaaattatattacaaactgtagtgtattacacctacctgccctatatgtaaaatgacttacagataagcttactccattctcaaaaaccagtaagcaagaaggaaccctcaggtattctgagagggaagggagtttcaagttcccaactcattgctgggtggatcagaagctagaaagccttgaagtccatgtttcaaagataagacttaggtgttggatctatgagacttataggggctcaagattttgagggaaatgctatattatagtgataagtatgtttgctatctgtctttcacccttctcacaattctcttttctggataataggcttttttgttggtttttttctttttttgatcctactttgaagagaggtatgaatgataatggtgactctgttcagagtgaccattttcaaagtttggaaaagaaccacatggacagattcaggtgttttaggatctgcactttgagaaacaactgttttcactttcaaccaacttctttcactcttcttataaccaggggtactggatacacccacagggttttctcctttatcctctaacccctttcagttccctgaatgccttccactagactgcaagctacctaaaggtagcagccctgattcattcatctctgtagccctaaggtgtagatagtaccaggtacccaatagatttcagttaatatttgtcaaatgaatgaagaagaaatggatattttttcagtacctctgtattccctttgtgacattattgaaatagggtaaatttgcagtggaaaacaaacaaacaaaattctatcatacttatgttttttttgtgctcataagcttcaaaatcacttctaacagtgtttctttagagaaaacacactctgttttccaaaaatatttttacaagtgttttgaagtttgatctatttttaagtttgaaaactttattattcgattgatggaatccttgattagttgtagcaaatgaaatttactgacttttatttctttttttaattattattattattattattattttgagatggagtcttgctctgtctcccaggctggagtgcaatggcgcgatctcagctcactgcaacctccgcctccttggtccaagcaattctcctgcctcagcctcctgagtagctgggattacaggctcccaccaccacgcccggctaattttttgtatttttagtagagatggggtttcaccatgtttgccaggctagttttgaacacctgacctcaagtaatctgcctggtctcccaaagtactgggattacaggcgtgagctaccacaccaggccctactgacttttaaaatacatttatgaggtgtttaatgttgtgttaaaaaattgggggctattgaaatcacccgccccctcaaatgtttacactgtggaaggcaatagagattrtcaaaggggaacattttcttagttggtcagacacaatatagattttattaactcacaagtgaattattcacaaattattttgtgaagcctggggtacttagagatttctgaaagaagaaattgaaagaatactgtagacagagtaaagaagactattataggaataaatctatttcatttcttatgtcgccatatctcacctatttccaagtgcaaatgattctccttaatgtaactttcactcttttcttcctgggacattcatgctgtgaatggccttgtttcccatgtttattgttgtggcagccttggtcaaatcagccttcttctatgccacaccttaatcttcctcaagcactgcatactgtttgattatatcattttccttgtcagccatctttcgtcattcagttaccaactgatagaattagaaatctttgtctttcattattgggcatctgaaatctagcctcatacttccctttcaaccttcatttctgctaataaaaagcagtaacttcccctgcctgagagtctagtctgctaatggacttctttacccattcatccttcttatgcagtccccacgtgctgccttcatgcttcttccagcttttctgctctgccccccacttactctctctagacctgttctttcacctcaccaggatctccagtccagttggccaatctttctttcctgtctgtcatacttctcctgttttctctttgttgccttttcaagtcaaattttatgctgagtaacactgggaagtactcaaccgggcctttgtattgcttgagaatctagccagctcttttttatccctctttcaaaacttttcattctcgtttgtacttctaacctcaacattgcccacatcacgttttcagcaagggactcagtgcccaattcacggtgtaattcacagtgtaaataaaagtcaacgtataaaaatttgtttaacttctcacctataaatctgtattcttctttcttactgttatcatggaaaaggtatctcccattgtgaaaggttactcctgtaccccttannnnnnnnnnnnnnnnnnnnattttacagccagttttcatgagacttgtctctatgatcttcatttttctatcttcctttcattgctcaatttattgcaatgtggcttgctacctcagtgtttcactgaaactgtagtctgtagagttgccagtgaccttccaaatactaaactcataaacatttttcaagatttactaatctctcaaacactgatccactgctgaccactccttgcttcttaacatttccttggtgccatggacactacactcccagttcttacttgtcccttcttatttccttttgtggatttcacttctgcctggcttttaaaagttgatattgattatggctctagcctcagtatactcctttctcttcacacactttcatggcaacatgctgttgaaatgaccatatatatgtcttcaatgcccaaatgtatatttccagttcagaagtctctcctaatatgccactggaatcatccaataaatacctcagtaccctcgtccaaactgattccttctcttttgattcctcattctatgaaagactcttagctacgtatcttcccaaaccttcatcctgaaagctagcctgactcctctctccacacatactgatgatgccagtattctacaggactttcttattgcccttactagttaatcaaagctcttgaatatggctcatattcctgccatgatctgtttcctcagacctctccagtgtcaacctttcaaactgaagcactgtgtacttcacctgagctttgtcttcaaaaggccattctttacctccaggcctgttaagatcttttccttttccagaaaacacaccctaatcctttgcttactcttttcatgtatgtacccaattgtggaaaaatttgtaggattgctttttgtgtcagtactattacttctccttggcattttcactgttttctggacagtgcttattccagaatcaggttgttaaataatagtttttaatcatgactccagtatttcagtgtaacaattctcagtatactttaagtgtgagattagaacatgcaattgtgctaggaggttgaatgttttaagatggcttccagaaaagcagtgatttgtttcaaagaactgtctcaaacactttaatttacttgtcttttaaggtacagaattggagagagggcatttacttatctttgaaggtttggagtatgttacttatgcagtcatcatttctcatattattgagtgcccacaaagtaccagataccacactgggggaatgaaacctagcattgcccttgtccttgcacaactttgagcctgaaggaggaagacagaccatcacatatagacataccaaaagctgaatcgagaattgtggcaggtgctattgcaacgaggatctatgtatatatgtaagatctggtcagagatgcaaggtttctcaaaaggtatagctccaaggctttttgtttgtttgtttgtttgtttgtttgtttgttttttggcttgctttcgtttctgctgttttcagagtatgaatggaatatcccaataggcattaacgtggaaatgtttgtatggtcctgaagcagtcagggaagatgtcctggattaagtgtagaagaggcaagtcagtagcctagataaacacccattgcatatggggcaggaaaaagtctagtgttgatatggataaaacaaatggcagtaaagttccacaaaacagtgtgttcaaaggcatttgatgttttgtgttaatattttaatcacagtagaaaattacatgtgggaaaatgttaatcaaattgtgcatgggaagaagtcacgtttctaatatgtcttataaaaattgagaaacgtaacaactaaaatgtttgcaacttagacaaatcattaattatgtaattgtaatttcactttaacaatgatcctgagggataagacacattttaaattttttatttctaccagtagacttatgtaagttattcttttttagcttttttttttgttttctgtgaaaaaaaactaaattctgcctgttaatgaggcagtagcacttgttttaaaagagatggtcagataattcttttaaaaggcagaatactgccatctgttgttcactgaagtttttagcctaagcaaacagaagccttaagttcaaatttaatagcaattcttgatatttaacagacaaagaccagcccacatttatcagctttctgagttcgtacttatttcagagattcttagttattcctatcattttttaaaactctttctcatatcagagaagtgctcacatccagttaagttctctttgcttcctgtttcttccaacaacagaaataataatgttttttatttacaaagtaatttgtacttaaccaagccttcccacatttgtgtgagcagtcacatgagtagctcattgcctgaatttattatatctttgccagctacatcatcttttctaattaagagaaagagagaaaaccagcgtgcaacttaaagacagctaaggttatcttctgaaagatgcgggttcttactagagtaagtgatgaataagtatgttccatttcctaaataataaaacactattgtaaaattgttaactttgagttgttacgtgagttcgctagtgtctggaaagtagttagaaaatataaacaagacagaatttttcaccaatttttgacttgtttgctgatagcttgcagggacttgtataaggacagaggccatgtattccatctcatttggtgacttgcagtgctctttgaacatcaaaagagaaggatgttaagaattctggtaactaatgaagtttgttatgtttcacatctcacatggaacctgcccacagacatgttgggaagcagtttgatgaagggccctataggttttcctcctactgtacatayatattatcttaaggaaaaaatccaaatgtaaactcatattccctgccagaaaattaaaatacgcaaacatctgcttccttaggatggcctttagccaaggttcagcctacaatgagttactgcaaaattttcacatgatttcattttttaaaaatttcccaaccaacttcaagtctaaaattataaatgggtcctatgaaagtataaacacatatgcaattttgctgtctctgaggtcagaaccagtaatgcaccaaagatcattgtatcaaatccagctcatcttctaaattaatgtagtacattaaagaccaagataccatttcctagtatcacrgacagcctcccagagaaagagttggagggatggagtggcacgtagtgctacagagatgtaggaggagacagcttccaaaaactcatcacacatcttttcccagcattgaggaccaaagttggatgagaaaagccccagtgactatttcctttttatgtgtcatctcttacactgtttattcgtctcttatcccaactccctttccaccctaagaatattcctcccatgctgtgtttgcctcccagggtgcctcccaggatgactaaatagaaagaaaaaaatacttccaacaatggagctatgatgcctgcttttagaattcttttcacatcctgtgttataaatcattccaatgcaatcaaccatattaactgaaaccaggacttctgtacaatcactttttaagaacttaaaattaaaatcaggactattatgagtattttgcagtagggagtacaatatatctgactgcatttacctagagtaagaagtggaaataggtttttgtttttattgttttatttatttatttaatttatttatttattttggtagagaaatcatatctctgtgctatcttcatttataaargaactactggcccagttcatgtaggggacaaacacccacgtgcacaacatacatttctttgcacacacaatctttctcaacaacaatgtttcaccaacaataatgataatgttggtgatgtataatacttatcaaacatatattttggaccacgcactctcacaagtctttatgtttatgatctcatttaatcatcaattacactatacagtcgatattactattaatccctttttagagaggagacaagagctaaagaaataaaatgagccaggcatggtggctcacgcctgtaatcccagcactttgggaggctgaggcaggcggatcacaaagtcaggagttcgagaccagcctggccaacatggggaaaccctgtctctaccaaaaatacaaaaattagctgggcatggtggcgcatgcctggggtcctagctattcgggaggctgaggcaggagaattgcttgaaaccaggaggcggaggtggcagtgagctgagatcgtgccactgcactccagcctgggccatagagcgagactccatctcaagaaagaagaaaataaaaaaggaaaggagaggagagaagaggggaggggaggagaggggaggggaaagggaaaattaaatgaatttactttttaaataaaataaaaatcttagcagatctgaaatttgaacagaagcagtctaacttcggttcttgcctccttaaagaccccatgtattacctcatataataaatatttgatattgatgaatgaaaaaaactttctcttatatcccaacgttttaaaactctgctttccaacttcccacatacacaaccttacaaattatatatatgacaaaaatatgtttttctacctttttgcttcccaaatgctaattcataaaccaggcttagctttctagctcttgttccaggaatgttaatgaatagctttaacaccgcaattacattatgtctcattttaagggaaagaaaatattgagtttaaaatactatggagctctcttaacagacataattaggacaaatagctggtctgggaattttaaaaagtttttaaagtagagaatcataaaaatatgatataaattttctataattctagtaatatattttaacttaatacatagagtatgcaggtttttgcacatctttgatgaagagccaagaatgtttctctcaagtatgtgtccactgaagtgactggagtttcaggttgccgttcttacttacaccatacccatatttcctatttcattgtacatgcttgccagtttccgtttctttatagtggaaacaacttaggaacttggaagcattctgagttgaaaagcctttaggtgtgttgtgattttctttttgaatctttatagttgtatctcccctacttaaatcaagggaaatacattcttaggctctcacccttataaaatctatttatgaactctgtgtaaagctacctgacttcgttttcaagggaacaattccatttttctgcaggtgtcatttctttgtagatattttgttagtctatgtaatttacagtgacaaatataacaggcctaaagagatttgggaagaaaggaaactgacactaggcaaatgcgtaacttacctattgggagaagtatatggaaattccaccaaatagcctattccttgtgatctactcagtgtacactaggcaatttaccataagaaggaaacagcatcagtgactcaataacaatttataaggtagagcttgtgaaagattagcaattaatacaataaggacttttctaagtctacataataattttaaaatctttttttaaatgtaaaatgcttaaagatgccaagatgtaattttaaaayctttttcttttttcttatttgatgggggtgtgtatgtgtgtgtgtgtaaatgtagagaaatgaattacttgcccaattggaagggaccttcaaaagatcccgcccagttctctgatttcagaggaaaagagcctgattgctctgttggatacagtattgcctataaggaaacctgtaggtttggttttggaagtcatcataaaacttaagatatttttaagtggcctaatttgaagtatatagcatttctactaggttatctagataatttctcaattctaatgtttcagcatttgtaacctatcttcaagtttcatgtagacttacgaagagaggcttttggtgctgcttctaattcttttcctccagttagaataaattaatttccaaagcaagtgacacgccagaatgttcactgagtcagaagactggagaattattacattttctgcctgtcagcctatttaattaagttatcaatttaatctgtgatttaaaatatgtagaaagcagagtcataacttgactatattggtgctacctcaaagcaaatttatcaagaattggatgcattatcttcatctacaccccaggtgctagataatctccttaatcattttaaagaataaatttatgttgaccctaccatttctccagtctttttctgatttttcctttgggcacctttactttctttaaaaaaaatgatgtgtatctgcttttttttgtttgttttcatttactcttttcacataattatttcctaagcattcttagattttatcttttagaaattctccagttctcaatattttggcataaactcaaacacagcaccacagcaaataatctgatatgttacttaatgatacatgattttattttacattctgttcgtaacttggttacatagacttgttagaatttttcatagtttgcaacttacttagaaaattttagaaacttagatgccttttatagcacgcaaataccttttgacctccacacatattcgaagatttcccttttatcatatcagtactgcaatgtcaaagtttttgcccactagtaataaaaattaaaacaaattggccgggtgcggtggctcacgcttataatcccaggactttgggaggctcaggtgggcgggtcacctgaggttgggagtttgagaccagcctaaccaacatggagaaaccctgtctctactaaaaatacaaaattagttgggcatggtagcatatgcctgtaatcccagctacttgggaggctgagacaggagaatcacttgaacctgggaggtggaggttgcagtgagctgagatcacgccattgcactccagcctgggagacaagctccatctcaaaaaaaaaaaaaaaaaaattaaaacaaattttctgtaattgattgataggcacacgtctaaaagtatgtataatattgattatacttgttgtattttaaacttcttatctatagcatcagactttctgggcctttggtttatgatgagtgaaataacttagaaccactctagattgtaatataccaaggccattaacagttgtggtagtctaaagccaggattaggtaggacatcctggaaatgggaaagtagactggatgaagataaaagaggaaaaggaagttgtttaaaaactgagtactcagtcgggcgcggtggctaacacctttaatttcaacactttgggaggccaaggtgggaggattgcttgaacccaggagttcaagaccagcctgggcaaaatagcaaaaccccatctgtaccaaaaatacaaaaaaattaggcatggtggtgtgagtctctagtatcagctgctagggaggctgaggttggaggattacttgagcccaggaggctgaggttgcagtgagctgagatcgtgccagtgcacttcagcctgggtgacagagtgagactccgtctcaaaaaaaaaaaaaaagaaaaaagaaaaaaaaacacattgraaaatggtgaatttaccaaaagtatcagttatttttggcttgatatataaaaccgcactttcctccactgtttatcgtactgaaatgccacattttctatttaaaggtggcaatccaaatttggttgccatttaaatagtgtctagggaaatacacttgcattttctgaaatgttaaatataaatatttctattacaaggagagtctgtgaagtagaatgttttatattgcttggtaactttttttttttaaaggaaaagatttgtttgatcatctgcaccataagaagactcaactgcgattttgtgcttagtgtggctcgtactgcactgaaagatggtttcagattgttagttttaagacttttctttaaactggcttttatataaacttaacatttagtatttattatcactatctaagatttcaccagttaaataaaacatttctgagtaccattggtatacctcaatatttaattatattatttttttcaaagttaataggcatggaaaaaacttctgtgtgaatcacacaattttttctcactttgtacatgatttaaaaaacactaccaaaaaccaaaacccctctcccttaaaattccttaatagggacatcctagacatacccatcctttgtagcttacctgctatttattgaaacagcagccagtccatctttctgtttttcaccatttcatgtgtggttagccttggcaggtttgctgcaaacaaatctgattgttggttttaaattgcatgcctcattgaagcctttagttatttgagcaaaaaagtggtaataacttcttacgtgtgatgtgtctgttgactgtaacataattttattctagaatcatgaaaacaacaaagtgaggacctgacttaatgatactaaggatatttttttttccaatagtagaagtgttcacttcagtttcttagctaatttcaataaggataatttgtctctcggcttgaatgttgcttttgttttcacttaaagacctttgcttttgcaaaagctacagcataatagtagcatcaaaatacataatgtgcttattttctgaattcttatgtaactgtgacattgacttataaagatgagttttcagtttctattttaaaaagtactttttaaatgtttactattttttctatatatacaagaaatacatctattactttaaagaaaaaataaaatgtattataaaaagacacacaatttgataattataaaaaaacttgtcttcttcccaataatttatttaaaacttgtaattctcatgaacatgttctactttttcttcagatttgtagattttgtatactgagaacattttaagagaactttgtagttattactagagaataaacttaatttcattgtcaaaaacatttaaaattttgtcttgaaaacaaagtttgacttaaaatttcaaatttgtatggaaacagtccagttaattgttagtttattagaacaacatggctaaaaataaacattactatttcagaggatcacactggatgagattttcagaagcataatgattagagatgcactttaaaatacttatttctaaaagggaatgttagctaagtggcatttttacaaacattaaaaaattgaataatgatattatctctatttgcagatgacatgatctttatatgtagaaaaccacaacaattctacacgcacaaaaattgttagagctaacaaatgaattcagtaaagttacaggattgaaaatcaacagacaaaaatcaataacattttttatatacaaataagtccctagctgaaaaagaattaaaaaacactcccatttacaatagcataaaaaatacttagggataaatttaaccaaggaggtaaaagatttgtacatcgaaaattataaaacactgatgaaaagaattgaacacagaaatatatagaaaaatattccattactcaatcagaagtattgttaaaatatttatactacccaaagaaatatagaaatttaatgcaataactatcaacatcgcaatggtgtcttcacagaaatagaaaaatgcaatcctaaaatttgtatgaaaccacaaaaaaccccaaatagccaaagcagtactgaggggaaaacggttgaaggcattacactttctgatttacaactatattacaaatctatagtaatcaaaatagcatgctactggcataacaacagaaacctacaccaatagaacaggatagagagcccagaagtaaattcaagcatacatgttcaaataattttacacaagggtgctaggaggacacaggtggaaaggggagtctctttgataaaaggtgctgagaaagctggatttctacatgcaaaagaatgaaatcgtatgtttatcttataccacacacaaaaatcaactcaaaataggtaaagactgaaatgtaacacctgaaaccatgaaacttacttatagaagagaacatgggggaaagctctcggacattgaccttggcaatgaattcttggataacacaccaaaatctcaggccaaaagagaaaaaataagtaaatggggccacatcaaactaaatagcttctgcacaggaagggaaacaatcaacaaaatgaaaaggcaactgacagactgggaaaaaaatattggcaaagcatgtatctgataaggaattaatatccaaactttataaataactcttataacacaataggggaaaaataacctgattaaaaagtgggcaaaggacatgaacagacatttctccaaagaagacatgaaagtggccaacatatatgtatggaaaagtgtttaacatcactaagcatcaggaaatggaaattaaaaccactataagatatcacttcactcctgttaggatggctattattaaaaagacaagatataacaaatgttggcaagggtgtagagaaaagggaaccctagaacactgctgttagaaatgtagattggtacagccattatagaaaatagtataacggttcttaagaaaattgaaaatagaactatatgatccaaataagataaaatcaccacctcataaagatatctgcactctcatgttcattgcattattcacaatagccaagatatgtaaataccataagcatctgtccatgaatgaatggatgaagaaaacatggtatgtatatatgcacacacgtatatacatacaatggaatagcattcaccctttaaaaaggaaggagatcctgtcatttgccataacatagatggacctgaagaacattatgctgagtaaaataagccagacacagaaaaatattgcattatctcacttaagtgtagaatcttaatttttaaaaaaggtcgaatattcagagatagagaataaaacagtcgttaccctgggcagagtcaggggaagggtcaggaaatggggagatgtaggacaaaagatacaaagtagcagatatataggatgtataagtctagggtatctaatgtacatgaggattacagttaacgaaattgtattgtattacagatttttgttaaataaggagatttcagctgctcttgtcacaaaaatactatgcaagacgctagataatgttaayctgtctcactatagtaaccatttgactatctgtacatatacacataacatgttgtaagcctcaagtatacacaatrcaaattatttttaaaataagtaaataaaataaaattctacttttagctcagaaaaataaaattaaccctatagataacaaatatgacatatgcatgactatgtatcctaaaattattaatattacacttaaattttcatattggttcataagagatatttatgcctgtgatcagagaacatgggtactagtattaaattatgcattaagtaattacagatatatttaagcacataaaattaagattttctgtttttgtttttttgtttttcaccgtactggttcaacacttgagctatggaatgaagctatttttctttgcagcctgatatttccactttccacctgtctgattttggcaagttatttgtgtctaatgaaagtgaaagtaataatagtacttactaatactttgtagacttgtggttaatatatatcaactttaccattattattatagttattgtaattctagcagtaaaagacataacttttctgtatgataattttacagagtaatttattcattacttacaggtattgcaggactagatatctttatggatgttaggtgtcatgatatttttctaattacaagaataatatatattcactttttctataacatacttttccaacccactgaacaatattttctagacaataatttatgaatctacccacatcttttaaacaaggatagacaactttataatacagatataatgaaatttaaaaaaaaaaatttatctacttatatgtatctcggttgtcgttgccagaacactgctataccctttgtgttattgtttttatatgtttagatatttgtagaagtatttctttcgaccagatatgtatgttgttttgctggatcatagaatatatacatttaagctactaattgataggcttagcaaagtttcctgccaaacattttggattgtttttcctcactactcgtttacccaaaccattactaatgcttggtgttataaatcttttactgttttgccaattttgtaaatgaaagttgtttttattatgttgatttgcaatttaattatagtggacataagtggctttatatatatatatattggttatttacattttgtttgaattgtctattcacttcctttttcaattttgtcctttagtgattttttagaagctctctgtttggatatgttttatcttctctgtgtggcaaacattttctcacagaccatttcctcctttgcttatggtttattttcttatgtagaagtttttatcttcatttagtcagatacattaggaatatccttggcagtctatgaattcatattatttttaaaggttataatttcaagattataaaatagtccctcatattttcttttaatcgtacaactttatacttctgttttttctctctttggagtttatttacttacttatataagtaactatatataagtaatatagttacttatataagtaactatatataagtaatatataagtaactatatataagtaatatagttacttatataagtaactatatataagtaatatagttacttatataagtaactatatataagtaatatagttacttatataagtaactatatataagtaatatagttacttatataagtaactatgtataagtaatatagttactgatataagtaactatatataagtaatatagttacttatataagtaactatatataagtaatatagttacttatataagtaactatatataagtaatatagttacttatataagtaactatatataagtaatatagttacttatataagtaatatagttacttatataagtaatatagttacttatataagtaataaactatatgtaagtaatatagttacttatataagtaaatatatatggcctctgtgttttgtgctcttcgtttctgctgtgaggacagagtaatgactctgctctgataggcagtttggcagaatatgacagatgtgccacagaatcccagaactgaaatttctattccaaccaacaacaggaagagagacagattgtgaactagcacacaaatggagtttttttgtgtctatctcgaataacattcattgaataactaccattagcaaaaatattcattgaataaacaccaggttcaagtgtcacattaaaatattactaaaaataacattttatggtatattaatgttacttttggagtgaaattcctaaagaacatagatgtaaaatgttgagctcttcataaggagtgatatgaagtttttcttccccagatctctgaaactttttgccttttaaaaactagtgttcatctttttaatttcttcaaatatgcttgaccctccccaagttctagcattaaaaaatgggccacaaatgcaaaaaagggtggcagctagggcacattttagcagaatttgaaataggtggtgtgaattttactgtactgaaatcctaaagaatcagcccaattcatttcttagtgaaaaagtccaaattaatgctttgtgccttcagattcaggccttttcttgcctgatcttgtcttggtttgtgtctcagtcttcaggaaccagtattactgtggacatcgccgtcatgggcgaggcccacggcctcattaccgacctcctggcagacccttctcttccaccaaacgtgtgcacatccttgagagccgtgagcaacttgctcagcacacagctcaccttccaggccattcacaascccagagtgaatcccgtyacttcgctcagtgaaaactatacctgttctgactctgaagagagctctgaaaaagacaagcttgctattccaaaggtaggtagtaatgacataccccttaaagggttaaactattttttttaattctcttctaggtctccttcctgtcacctcaactccatctgcagattcatatcagtgactcaggcaaaatgtgttgatcgtggtgacagaagtaataaatatttaaacataaagacttctgtccttatacttgatagttttctatacatagaaaatttatctttttatgttacctcttttatttaatctttcatgttacttgcaaaacgttttctcttctatatgccaggcgcttttctaaggtgataaggatattgcaacaacaacaacaaaacaaagaaggcagaaatccttgctcctttctagtgcagattctgtttaaaattcattgactcctaaagctaaaggttctttactctttgattctcttgaatgatatacttcaaaataccctcctgactttccaatacacaatcagttttgaacccagaacagttttagtcaattatagattatttaaagtaaaatatatccttagtgatttctataaatatatattttatatgtaaaaggaagaaattacacaaacattctttttacatatatggcatgagttttatgaaagtaaattgtaggaggatcctcacccagtttagatctcaatattaattaaaaataagtcatattaaagacaaatcagtgtcagtggtctctggtatattcagcacagttatttatttagtaaacaatcagctatccctttgagctggtggtcagtcagtaacatctgtgcttctgctgttgtgagtctcttctctcaggaatgtgatcttcataactttgtcaataacatatttacatagtttccttccaatatgaaattccctgataaagatatacctaagtataatatgatagtaaggaaatggagagagagattaactggttccttcaggtctcaaattagacctgaggttagtgacagatttaaggcaagaaatctggtatttaagagtgtttgagttttctcttccaactgaattaccttctaagatgcacattcagatgtttaagagacactggaaactatttaatatcagagctattcttaaatcccaaggtgacatataattcacttctcaaaattttttaccttctttggaagagcagaatgtctttgtgaactatgcctatgtggttggtttattaggagtgattagccgcagataaaagtgggttgtggttctgtgtgttatgactgttgctgaagttataggaaaaagaccttcggtttaactttttcttttcttttttctttctctctttcttttttttttttttttttttttgagacggagtcttactctgttgctcaggctggagtgcagtggcgtgattttcgctcactgcatgttggccaggctggtctcaaactcctcgtgacctcaagtgatccacccgccttggcctcccaaagtgttggaattacaggcgtgagccactgcgcctggcccagtttaacttttaaggtcaagaaccactttagagtgttggtgctcatcctagtgatcccagactcttgtctcagtgcagatgatgctacatgtcctgtttaggatatggtgggagaagaaataagaaggggaacagcaggttggccagcagcgtctcctattaagaggagttgacactgatgacattacccatatctctgttgtctaagttacattaatcataagagaagtggtgcattttatgaaagacttgagctcctttcatttgtgaatgaagataataaagtcaataatacttgggggtatgactgtggtgcaaggtgatataaattaattcatgcccccaaacaagtgacttttgaggaagaacttctcataataactaatatgtgtgtataggtgtgtaaatcctgttgaataaatataactataaaattatcccagaggcaattgactctcactcctataatcacatatttgtataagcattgaaataaagaccctaaaaggttggttatgtatttatttatttatttattagacagacttctgctcttgtcacccaggctggagtgcagtggtgtgatctcagctcactgcaacctccgcctcccagtctcaagtgactctcctgcctcagcctcccgagcaactgagattacaggcacccaccaccacgcccagctaatttttgtatttttggtagacggggtttcaccatgttggccaggttggtctcaaactcctgacctcagatgatccacccgccttggcctcccaaagtgctggaattacaggcgtgagccactacgcctgactgcttatttttataatatgcattcattttggtcagagagtcttttattaaatttctgagcactcaaattttagataggtgatattaaaccaatgtaatttagtcaattcacttctaattaaaagcttgtttccttctattatattacataaaatttaagagatataaaatattctgggtaatgaagtcaagtctctttcctagcgcctgagaaggagtttgcctcctggcttgttgagacgagtttcttccacttggaccaccaccacctcggccacaggtctacccaccttggagcctgcaccagtacggagagaccgcagcaccagcatcaaactgcaggaagcaccttcatccaggtggcatacggctcctgctggtttaatgtctcttagagaagttacttgccaaaaatgagttataaattacaggagaaggaaggctaaccaattacatttggttggaggtcagctttgaagatggaaagggtacatggttcaaatgcagagcagtataggggttaacatcagataattaggcttaacatctgttgtgtggccttatatataagtggaaagagtgacttgatgtgatctctgccattgtgaccttagatgggaagggttaagcccaggataaaggtaggtaattttatctrcattgagattcataccgagacccttaaatcaaaagcatacaacttgacatttgcatttgatatgagatcccccagcccagtcattagcctcccacaagaccagctgtcttagcgttgtacaaaagacaaaagagcaaatcaaaagtagatcatcctaagaacacctagatatgttcaaacatttggtaatttaaacttttctgaggatattaattccaatttttgaaagcaacttaaaagccagaattatcaaaactaaagaaaaggttatattaacatctaaaaagaatcttgaagaaaatagctaaggaaagtgcatttagagggagatactgtgtccttttctatttagaataaaaatattatacttatcttactttattcaaattcrttaattgtgagaacatttaccgtatgatttcaggtttttgaaacacatgtataagttttatcaatgacctaatgaatgaaaaaatatccacatctatgtcgtattatatgacagcaatatcagaagtaattttctcctgatcgttagcctgggatataaataaaccaccatactgagactaatagaaatatttcagatgataagaatttaatgactgctgacctttcttttttgattaaaaatttttaattggtttcttccatattatttgtattctaagacatctatagaattggaaacaaactcaaatgtcattgtatattttatatgtcagtataatcccactccatcctattacctggacttttgtaaaacttgtaaatgagacaagaagagattatgtagtgtttcatgaaaatttcctgacggttgaaattaattagaagtcaatgatcaatatttttctctaaaaatattggtcattgacaattgctacagcagcaaatactgataaatgctaatagtattatagttaactattgcttaataaaatgaattatgttttcagcgtgtatcattagagtctgcccattttgccagtgcaacttgctaagtttcctgtcatagtataggtaatgcttcatgatttccttcccatagaatgactctatgaaaaatccactcatgccttctcaaatgccttttattctgttattctttgttacttgtagtcaaatcctatctcccctgcttttctcttctcttagtcaattaaatgaacttgagggtttaaattgaaatgatgacaaggaaggaagttccaaggacttttaagaacttaacgcccaaggatcttgtcattcttctttgtaaaatggatcatccaaatatttacaatagaaataaggaaaatacttacaatagamataaggaatagcatacaattccattcattctcattctctcattcctgaaaatactcgtagatgtcttgtctggacattcattttcctcactgcctaatatactatctcataatctcactgtcctatgaaaagtactgatgtaaaaatctgaaagcaatataattccttcatcattgtgaagaaaggaaattcattctgaatagaatttgatccctttaagggaaaactatttataagtaagtggcagtagtaccaccactaaatacagctagttttggcttgattataaatcacagtcaaaaccttcttttgagttttagccctgaaattgcttcccttttagcccttttatttatttattcctttccatatcttttcatttattgggtttgctttgaggaaggactacattgatcaaaagaaataagaatgagaaataataaaaattagaaacacaacttaactcatattcctttatatatacagctggataatttacccctgggtaattttaaatacagtctggtagaaagcacactggactgagaatctgaagggtcttggccctaccaaccactcagaaatgaaatgtactgtgttcttagaggcaagtcattagcctgccagaatctctgtacccaattacaaggagtcattaggaaaaaggggaactatgacataattggaggggtaaattagatggaagaatacaagtaggtgcttaaaaaataggctttagagaaataggaaaagctgaaataaatcagaccctaaatgattccaagttgaccttggaattgacccctgcctgtgtattcaggcaaaaagaaggcagtaaacttggcaaaagagactgttacctgatcagactttaaggacttagaatggagtcattacggggataataagagcataagaccacctttgggaagaagattgagatcttccatcacaggcacatagataattttcctctgctgtgccagcatgagaaaaccgtgtaaagcctttcctaagctgttctgctttacagaatccaaattatttcatattcatgaaatttaaacaggaatcaggaaataaaggacagcgatgaaaagctgaaaactgtgagggtctcacacagcaatatatgaaagcacctgtgaactataatgcatttatwtataatacattgatttattgtattaatagtaaaatacaattatttagtgtattaagaatgtgatatgactaggatgttatttatcttgagttcattaaatctgcatttattaaagatactctagtgtattttgcaaacttgaaaatgaacacattttaaatgtttttatttgaaaaaaatagtaaattgttgagatagccttcataatatatctttctgatatattaaaacattcagttactgtaaggcattgtctttaaaaaggctacttagaaaagtaaaagtaataacctattcactgtattatgtaatgagaactgcaaacatttgggccacatatacattacataatatttcttcacagtaatcagttagtcaatccagnnnnnnnnnnnnnnnnnnnnnnnnnnnnnnnnnnnnnnnnnggaccagcatcacgagaaaatagtcagtgttgttatctgtttcagatccaaagtttctttcagctcattatttcctaaatgccaagaacttgtgaaatacctaggatgtgctttctgaggaagatgtcaaagaaatatttttatgccttacttaattgcattttataattgctgaaggtcataccacatttcaaatgtcctcatatatggaaaactgctattagaagtaaggagaaaagatgaagttttaaaatacctgggtcagtagttgaagaaaaatctctctgaaatggaaaaaaaaaattgagataacaagtgtcagagtgtcaaattgacctcaacacaaattacacatcttacccattgccgaatttactagtaattaatggatacagacaatagtaagacccatgcttagcattctttcctttgagaggtctattagtacaattttctgaaagtccctttattccacattagcacatgttctggtttggatttagcatgcagtgttctaagcaatgcatgcataatattacttgcacagagggaaccattttagctctggaacctctccaaattatatcgtattaattataagcttatatggcaatctccatgcatccatgagcccataattctatcaattttaggtttatttacaataggctacccagacagaccaagcacatcctgcttacattgccaatctaagattggcaaaagatcaaattgtcaaatcatatttacgtaaattatagattgtacccagtaccaaatttactagtgcttgaaaggacacaggtgttagcaaaacacagaccaagcacttttcccttggagcagtccaagattgtcaacacaactttcgaaattcccttctctcccacattaggatggagtctatttcagattcaacatgtrtaagttttaagcaacacatgcagagaaattttgtcttggaatacctccaaaatttatatcacaatcattgcatgacttacataacattctctagttcagtcttccatgaatctattaattccacatttatttgcaataagcaacctaggcagaccaagtacatcttggtaaaagcatttgctagaggaagattctccattgcctttctcctagttcctatcatcagtgtgtttagcatcagctccattgttggcatgtccctttttacaaattcccttgtaaaaaggtaatttgactagatcatttccgtcacaaggaaataatgcaaaaaaacacaccattatttatgaatgatttcatggtcattcaatttttgaatacagatccaccaaaaataatagagtactgaagtaaacattatgacacttacagcttatgtaaattcacccgcatcttaaccagttaatctgtaagcctcttttagaaaatctgtgaggaacgtaattttagagtacagtgagaaggtgtttaatttttattaattggataataagaaagttatctttcctctttgttaacccagtatgcttgatgagtaactgctatatccctgcaacagagattgtttttacataatctgtttcatcatttggaagtacagtggttctgtcactgaacctgaaccaatactcagattggcaaatctattagagaaatgatggttgggttctggcaagactggcccaataactgatgaataatttgtttaattttcttttaattctgtctttctggtgcttttagtcctgattcttggaataatccagtgatgatgaccctcaccaaaagcagatcctttacttcatcctatgctatttctgcagctaaccatgtaaaggctaaaaagcaaagtcgaccaggtaagtaacttaactggagaagggttcatactgtgagtgtggagttctagagtaaaccagaccttaagcgttgaaatattctgagggtgccctatattcagatatgtttggtttgtctgttctaataaccaattagttattttttagaagtctcaataaccaattagttatttaaatttctaccttatgtgatgatacagattccttcaaagttgttgtatcagatttcctatcttgaactaattagatgcataggaaatcacttttaccatcaaggatcatctgtggtagcatcatctcataatagaaattccaattttttagtgtctgttaaaattatttttcaggagtatgatatatatgaattcaagaaagtgttttatttactacacatgagctatgataaggaatttagatatcaaaattaagaataataaagctttaaatgggaacatgaaatgatatcrgggaagactacctcatttgttcagggtccttgctcacccaaaactgtaaaaggagtttttgtcagattcygtctctgaattgcctttcccctagaagcccaaytaagaacctgggagatttcctctgacctttcctttttggaatctaacttcatggtttcacttctcagtattacagaaaatatcaatgagattttcagtaacttcctgcttagtttcttaatcttctgcctttagcagtttaagagttcatcaaatggttaaaaggaaaactgcccacttcccactgagatatgaaacattcaagttcwggcttccatggcaaccccaaactccaatttttatgtcaccagcctcatgacattgctagaagctctgctggcttgcctcccaaatagctgcacccctctgtctggatccttcacttcttactccatgccaatagtcagtaaatcatgctatgaaggsaagaacaatttgcaggattttggctcacctttctgaggttctcttctttatgggaacctagtccctcagaattgtgtgctttgcctcgatagcttttttgtaccattttattggaattacatcagtaaaatagaccattaaggtaatctacttttccaacaactaatctggtcctctctgctctttagaaatgttcattaaattttgtcacttagaagtcattattgacctgctaataaaattgagctttcatcagggccaggcaatgtaggctaatgtaggcaaatacttaaattgagatattcctgaaggcaaatacggatttgctcagtaataaggagaatcatctgggaccccagcaaggtagagaaactgcatttgagaattccacattaaacccaagactcttaaaggggtgctaaagtgrttttaggtatgtaggaccccttggctccctacaaaaatatatatggatacttttggaagggaagcatcaccagttaagggccatgagattttatcagatcagattcaaacatggagcttacaaccaggatcactaattgcacaaagaaacaccatgagtttgagttaacagaaacaaaaatayaactttctagatctgtaaaagggttaaaatatttaaaytaaaatttaatttaaaaatttacatatttaaggaaaaataatagcaatgagaaaagacataactgcagagcagctaaatgtaacttttggaaatgtagtcaaggaaatattaaatagcatagtagactactgaagaaagaattattaaactgggtagagaaagatcggaagaaattatccagaaagcaacacagatgaagaattgggaagtataatagattttaggagatatagaaaaatgagtctaatgtacatgatatatgtaatcatagttttagtagcagatagaagacaaaaatacttaggtgaagcctagtaaatggaaagaaactcacacgtagatacaaaatagtgaaactacacaacaccaaagatatacacaaacaaaaatcctaaggtctaccagagaaaagacaaatttccttttcagaaaaggcagtcaggctgagagcagagttgtcagaaatactggcagtcagaacacagcagaatattttcttcaaatttctgaaacaatatggtaacctaaaattttgtgcctggcagatgcatcttacaagaataggagtgaactaaagacaatttgaaagaagtcaaaactttaccacccgccaaatctttactaaaggaatttatgatggatatattctagaaagaatatatgatggatatattctagaaagaatatatgatggatatattctagaaagaatatatgatggatgtattctagaaagaatttatgatggatgtattctagaaagaatttatgatggatgtattctagaaagaatttatgatggatgtattctagaaagaagaagaagaagagaaagtttgagatctaatgaaaatgttaaacaaatctgaaaaccatgggtcaatccaaacaaacattaaattcataaataatagtatttccagatttgtgaatagtttttataagattttttaaggacagaactaaaatttcagacagtaataatacgtaattcaagagatgaaatataaatttaagtgttctaaatccatgtgtagctcaaaaagggggttcagatgaggaaactgagggaaaagaaggttaagtaatttgctttctctgggtcatgcaattaatcctgaatactttcttttgtcctaatgacttcatactagaaaaaaatgaggatgacaaattgtcataatttaaaactaggatattttgggttctgtccttgggtgggtacaagataatggaagggtttggttttctcttcctgtttcttcggttaagtaataacataaaaaatattgaataaccaacatgataagatcaagaagctgaaaattatggttagggcagaccctggaaatatcagatcaagtgatggaacagcctcatattcctgtgtcctgatccccagtttgtatgactkcactctagaagaaagagcaaaggagcaaaatgtaaaagggaaggaatgtccacataagataccacatgggcaggtggtaggaatgagagccacaggcatagcaagagcccccttccattcttgccatcaagtgcataaggcatttctatcatgatcattttggagyggattttgcattgtggcatctttagacagctgtcacagcacagctaaaagtttataaaataacctatatcccaggcatgctgaatccaactaattaaattcctaaagttcagccaaaagagacaaacacatctatcaagaatcagagagcctaaagagattacaaccctccctaatcagatgggcccttctgctttaaaatccttgcttccctgtttgggttgatggagctaagtggttgtgacwtgtttgatgcagttgactgtgatgcatcctggttttccataaactccatggaaagaagctgggaagagccccctcgtggcaaagagtgtaagcaaatggaatcaaatgaaatgtgaagagagtctgaggaaacatgtagcagcaataggcaatgaggcggagrgaaagcgagtatgaagtaagaagaggcatacagaaagataaataccctgtttccagagagggctaatgaaatctgttctttgcgcaaatcaagtaaacagygtgtcctctagttcagtcaatcaatgttaattttaaatagctgaaacacaaattattatgcagttactaatataaaataaatgaacgaaatcacataggactcctttaataaaagcttaaaagcaggagattcaaatataatttgtattttcaattttgctcttctagtatgagtcactgacattgtggagctaccatgatattattctgctttaaaaattccttgaatttatcgttactgtatttgcagtagtcctttcccggattcttgtaagtttggctgccgactgcagtgataagagatatctctacacctataatctagactctgtttttcctatacaaaatttgaaaatatagagaactttaatcatggtattgtgattctttttctttggcattctctttagatgcaatttctgctttggaaaaaatattcgggctatccattttcacctgggcatggaaaaaaagagatgtctttatcagacaagctggttccttttttgttccattaaaattaaactgagagagttttatagcacaaaacagatggattcacttaaataattcccctgtagtattgtttattttctctctttgattgcccaaaattccttgtgtcttgacacacattttctcatgctctcaggaacaaggaattaaaggccgaattactcaaaggagttggcattttagactttatttttaaaattatatttttaattttttgtttttaaatgttttgattttaagtatttcacattaggacagtttgaatcattcaaaaatttatatttcatgagctatgtcttcttcctggaatctgctaaaattactcaaatatgaagtgaagataaacattaatatacttgagagaatgcatgtttatcggaatctcttcactcatgggtgagtgtgtaaatgtgtgagtgtgcgatgtaaaattagatgagattttcaaaggttttaacggtcatccctctaactttagacatgattacattgaaagcattttagaaaattttaaaaacttccaaaggttattcatccctattccttagactgtcctctttctgtatctgaaataatttatttatagtttatcctttctataaagaaaatttggttattatctgcatttatctccctatctttttgaagaccgatacggtcttcaaaatatgcatgcacatcctaattctttctgtttttaaactttaagtaaactaagataatgcacactaggaaaaatagtagtttggctttggaaaaaaaaaaaagagaacttatacttttataactttagcttctcacctgcagaatagaaatatccatgcttctcatgattgttgccaagagttacactttttttatatttatttatttatgtattttttgtgagatggattcttgctctgtcgcccaggctggggtgcagcagtggtgggatctcagctcactgcaacctctgcctcctgggttcaagcaattctcctgcctcagcctcctgagtagtgggattgcaggcatgcaccaccacatcaggctaatttttgtatttttagtagagatggggtttcaccatgttggccaggctggtctcgaactcctgacctcaagtgatctgccctcctcggcctcccaaagtgctaggattacaggcatgagccaccgcgcctagccgagttatgcttttaaaagtgttcaaaatatgtagacaaacactatagaagcagagcttctctcttacaggtttattttaaatttcatcccaggcagtaaatttgatgtcttaaaatctgcttgtttgtttaaatttagttaatccgtgagttccaagaactctaatggttgtgtgaattttaaaatgtgtgtttgagagtgaattgcatgtatctgaagcaatcagctggcagctactaaaacttagcaatgaaaaaatcactcttctcataaattgccttcagaaaaaacagggtgtcaagacagaaatggacaatgttctcatgggctttgaactattgttctgttaaaaaaaaaaaaaaaaaaaactgtgtagaaaactgtcccaaaactcacagtttactatgagaacagctaaggaattgcctaacacagtgtctatcaggaatctctttttcttatgacacagcaattacttttaattgctgtttttgcaattacttttcattgcaaaaaccacaattacttttgcaccaacctaataaaactttgccctggccctacccaaccctatccagacttgcccagcaacctctctgaccacgttccctgcccctctttttgctttttgctaagctgccagccactgacctcctgactgctcctctgacatcccccaggtatgtccctctttcctgaacatgctttccccagctacttctctaaatgtcttctgtatttcatgaggcctctattcaaattttacccacccccaccctttcccagccagagaggccttctcagtccatcttatctaaagagcatttctgttcttccctgccttctactctgtgcattgttttcttcctattacttgaatttaagttaattttcttttttattgactttagtttttagtttctgtctcccctaaaaaagtgggagctccrttagagcagggtttttattttataacctactccatccgtggagcaagactcacaataactacttgttggatgaagaaatcattgagatactcagtacagatacctcggtaaactttctaccacatcatactaggattcagctccttaacggctacagtgcctttctaagattatctggagtccctgtctaaatccaaaaagtggtcaaaactagaccaaccctttttaacctttacatcagagcacccatatatgtgtaatagtatttgtgaatatcgtagcattagagaaatgggaagggatttcaagtttgaaaactagacttcctttattttataaaattataataagaaaaactaattatgagctattagagataatattaaaaattgagttttttctagagtttccaaataaaatatttccttttttaaaaatattttcaaccattaaataattcacagcaaacttataacccacttgctgtgcagaatcatacattgactgggaaattctgagttaaaacctttgtgaacttaattttttgttttgtttttggctcaggatactatgtaatgtgaaggtttgtcgttatctttggaaaaataaatgagtctttttaatagacgtagaaaccgaaataaaaaccatcaggcatgacgtaaggagcaatgcaaacgctgcctaatacgccatgggttttacttcccccttggatagtctctgatagaggtactggtttataagctgcattttactaagagtagctgggtttactctatattctcccatgtactagtactgtgaccttgggagggttttttaacctctctgggtctaagtggtttcgtttgcttagtataaaggctgggagggggttgagctgctgattaggaactaacaatagatatgttgagaaagaactagaaggggttgctgctcttcacactgaagcaaggggagagtgagatttctcatctttaacaacaacaacgacaaaaagaaataacagcgccaacaagaaattraaaagaaaattacacacgaacacacaaaatcgttcaacaaacttaatattcttttcagtggaccagaaaacctttggtatgacaactcaaacttttgaggaagctggatcctggaagcaaactttgctgtaagccagctgccagctaaccacacacataatttgatgatgtgaaggtggatggctgtaaatgttcctaagtggtgagaaatagacaacgacttttaataatttcatttcatttgccctacattacattgttcagccataaaatcatgaaaaccagtaagcaggttgttaggcagaagttatttctctccttttttccattttaactgcaggctgccttctctgtgtttgggagagagtaacttcaaaagacatcgtcctggtcttccaacagccacgttttgaaatctaagccagtatcctgtaaaattcttacaatctagagtaaatacagacagtttggcccaaatacccatacttgaaatggaaactttaggtctattgtttgctctgaaatggattatattacattttaaaatgttttcttcaaaaattattttgatcaaagcactctttcacaccgaaaggtcttatttcactgaaactgcgaatggttaagaaggttaatttcctctcagtaatgcatcttctgtatttacatattttaagcatctgatgcctgctgaactctgcccccagatactggttaacgtttaaaacaatagcagatcctgttcctgctaaaaccttcacaacctaagagaaagtaaacacatgagaaaattttaactattatttccatgtcagaatgacaagaagaaacaaaaatgggaggagaaaataatatccttctgtcctgaagttactccacgacaccagggctttggctgtatgtgccaacattgccactattttttttatgatgattcattcctcccatttaatgctgtggagacaccccaaccacactggcttcagatgttggtatgtggaggaggccagcccggtgacctgagcaggcacgtggttgttactgagtttgtaagagtccaggtgaagttcaacagttgcaattttgcattttaaagacatttgtttagttacttaactctcattctttctcaggtgccctcgctaaaatttcacctctttcatcgccctgctcctcacckctccaagggactcctgccagcagcctggtcagcaaaatttctgcagtgcagtttccagaatctgctgacacaactgccaaacaaagcctaggttctcacagggccttaacttacactcagagtgccccagacctatcccctcaaatcctgactccacctgttatatgtagcaggtaaggattttttatgaactgaagtttaataataaaamygatgatagttttcccctagaaatacctaccaccagcccacgcagcttggggtaggtttgccaaagtattagacaaccaagtataggataatgtgatttgtgttgaataggctacaataaaaacttatgttttagtagttttctattaatgaagtttagaatccatgcagttcatacagccaatctttagagaggatacaaaactgttagctgtatatgttgcctgtttgctgatggggaatatagaaaatatataactaaaaaatgatatcaagtattctgttgtaattcttcattttgttggaatgtttgtacttgttctccagggaatgggttacattgatattaggcatatttaattgtcagtttgcatttcccatttttgcaattttaaaatgtgwgaataatacattgcacaggatggctggactcaaatagttctctgaatgaaatttaagcaattgtatgtgctattctatcatgttgaaacaaaattacaaagtgttatctatcacagagkttaagaaaaaaatggcctagcatggctggagtaattattttgccaatgttgtcacgaagaaataattatctcttcttactggttaatgtatttttattgttcttcagtaacagcttgaataatttatcttaaagcattatgrtattttttaagtagaaaaacagttgagtgtttttaactatgagagtaccttgaataaaacagtatttcatttctgaggttgatgaggataactatttgaataaatgagtaacttgttggttttctagtatcaaatattacctcatagactcagattttttcattgtattcagctttaagaaatagcaacttatattaagcctcataattttcattttcatattttttactcataagttctgtaaattaaatgaatgttatttataatttttatttttacctcctttatctttaccggcatttttacatgagaaattattttcattcgtttgcccagagccaaagttattctactatgcaaaagttattctgctgccctctatgagttttttaataaaataatttctgcaggatattaatctcatctcttttccacaaaagagcaagttctgtagtaaaatattcagaagatatatcatacatccctgttagaaattcacaacacacatggctttattaaaacctctgagaagctctgttaaaagaatccctctttatttatttttgttgtttcatttagtgttttctgaatttattcgaccacagaaccaatttctttgggttaacacccaagaattgcccatggatcgaatgtttggcagaacacaattaagaagcattgttttattgtatgcaccctgagccaagatgaagcccagtggagtaatcttcatcaaggacatctgggttcagcatttttagggagagtctcccactgtgggttccggacttttgggaaataagtcccctaaagaaaggagagagatgttcagaaaagctctaccactcacgcagcttttttcatcatagtgtattttttttttttttttttttgtattcttagcaggaagaatgtaatgggatttgtataaaaggtttcagagaaaaacaagaggatttcactgtctacttgttcagtaatgtttataaatccagtagtgtgtgttttatttgtttgggctttataaatctgtaattcaaaccaggttttattattgccttaaaggcagccacccatgtaggcacagagagctccagaaacacacaactaattgttgtggtttcccctgctgaacttgaagagtttggcgttgaatcccagtctcttggctgctgtaatgtctatgcaacaagctatttttctggcatgagagctggcatatttgaagtactaatttaaatggtccttttaggtattattttgcaatgaaaaagtttaaggctaataaactcgacttctcctgagcttcgtctgagaatgtaagcctaccaattgcatctcctttcttttccctttttgtcctatcattttctttttattctctaacccaaactgacagatttaataattagaaatattttacaggtaacgtttttctatttacactcaagggttgaaaagtaaarttacttagtatgcagatacggtctacctacctcttctcttagtgcacacacgagcacaattcaggaaaaaaaatgatgagttatttaagatattaaacaataagctatcactacttttttcattttagagtgggtagtctgtggttaaataacaaacaaaaaaatcccctgagaccctttgtaatatcagtcagaaggaaagaacccagcagcaaatgcagaatcaaaatctaatcatgaagtttctaaacaagacagaagagggaagagccagtttatggcctgtgccaggccatttgtggggttactgtttaatatttaaaacagtcaaacttcattcctccaacaccctctgttagagggcattgctcacctctcttacctttgtttttcttggtggtttacggtacttctagggcctgtttctctcaaccagcatcctatgtagtcagtcatcaaaatgcacccctcttttgttcatttccttagggccttaacaagtaactgatcgatctgaaaaaaagaagtcaatttttattttttagcaaaacataaaattcatatactatcattctatttcaacctatgctgtcttaaagttctgtttagacataaaaatatcataacccaattaaataaaataaatctaataatgaggcttttttttttttttttgagatggagtcttgctctgttacccaggctggagtgcagtggtgcaatctccactcactgcagcctccatctcccaggttcaagcgattctcctgcctcagcctccccaagtagctggtattacaggcatccaccaccctgcctggcaatttttgtatttttagtagagatgggatttcaccatgttggccaggctggtcttgaactcctgacctgaggtggtccacctgccttggcctcgcaaagtgctgggattacaggcgtgagcccataatgagcttttaagcagcctggcccataatgaggcttttaagcagacagaaaggtatttattggggaagataacttttgtctaaatataggtcaacacctgcaaaatggctactataagtaggtagcagcctataccagtattctctaaataatctaacaaaattttaccatcactttcacctcaaatatgatctagataaaggaggaggagaatgagagtcaaatgaactttctaatcctttgtattgattactctctcacaaaaaagaaagtagtacactgcatatcagcatttatgtatcaaacaaaatgcatattttcacaaaacaaataagcagaaggtagaaatatttgactattgttgtttatcttaatgtatacatagatggtatgtgcctatgactttttgaaaagaggaggctacacctatagctcttccaatattttttagctgtggcagaccatattcccaagggaatcctgctgatgagcccctggagagaagtggggtagccactcggacaccaagtagaacaggtaattcattgttttggattctgttgcccaaaatggaaattgccttatttttgttttcctgatcaaaacagtgayctacatttctgatattttgkggggcgctgggagayggggtctcatgatgttggycaggtcggtctcaaactcctggcctcaagtgatcctccygcctcagcctcttgaagtactaggattacaggcatgagccactgtgcccagcctgattttttaaattatagatttaaaaggacaagggagaaaattaaaatcatctgtactcctactctctagagttaatcattggtaaagtttgggtgcaaagctttccaaaattttttaatacatttatacatgtgtatatttttaaaacacaagaggccattttatataatatatagaactatatagaaatattattttatcttgctacttctgacattggaagtactttaagtggttcccaaaacatagcaaatactcaataaacttccttcagkcaccttagtcagctatgagaaatgtcacagttgctcagagaggatagacttcagactctgggtgtttactgattggtcttttagttagcacagtttactgctgactgaaatggcgacagtgaagaaggacagatgaggaaggaagccacaggattccaagaaataggattggatacataggattgcccatgctcccaagcatatgccatcactctgtgctacacagagaactttattcctgggtgtgtcaactcagtttctcccacctcacgtgcccgttctagagtgttttagtcactcagtggtttaatgtatagggagagaaatagagaaaaaagaaacataaagctgtaggatttgttaaaggtatgaactgttgatctaaaaaatattattgaggggttattgaatgtcatgcggattacagattataatttccatctgttttactttgttaagagatgtgtgatgttctccaccctatgatcctatgttcttggagtgctcaggaaagcagtatttccctaaacactatatttaccatatgcatcttagcaaaatttgcttaaatgagcccyctttccccattgtagatcttgtaataagttgttctcttttaattgtagatgacactgctcaagttacctctgattatgaaaccaataacaacagtgacagcagtgacattgtacagaatgaagatgaaacagagtgcctgagagagcctctgaggaaagcatcggcttgcagcacctatgctcctgagaccatgatgtttctggtagtcccatatcacttaactcactcatttacttgagagatgagcttctgttacagatattggctcagaaatgaatctttgaggccaggcaaggtggctcacacctgtaatcccaacattttgggaggacgaagcgggcagatcacgaggtcaggagttcgagaccagcctgaccaatatggtgaaacccctatctgtaataaaaatacaaaaaaattacccaggcatagccaggtgcagtggctcacgcctgtaatcccagcactttgggaggccaaggcgggagtatcacgaggtcagcaatgagttcaagaccagcctgaccaacatggtgaaaccccgtctctactaaaaataccaaaattaccaaaattagccgggcgtggtggcacgcacctgtattcccagctacgcaggaggctgaggcagtagaatcgcttgaacccaggaggtggagtttgcagtgagccaagatcgtgccattgcactccagcctgcgcaatagagggagactctgtctcaaaaaaaaaaaaaaaaagaaattacccaggcatggtggcaggtgcctgtaatcccagctacctgggaggctgagggaggagaatcacttgaacccaggaggcggaggttgcagtgagctgagatcatgccactgcacaccagcctgggcaacagagtgccactctatctcaaaaaaaaaaaaaaaaaaagaaattaatctctgaaacatgagatttacagatgtatttcatccggattaaacatgtattacagcccttcccatacatatcaatatattttttctctttccaagcattattggtctcttaatggttctattatctggtgattagaagcataagtatttatagttatacaataattgcagatatttattaacccaatcaaaaagtaaatataggaaaatgtattatttcattccttaaaacaatattttataaagaaagaaaagaaagatgaaggaagggagggaagaagatattcattgtcttagggcatctgctggttttctctagtatctccttgacttagaacatgaaccaatatttgtttttcttgtcatattktcaggcatatattggcactagccacctattaaaatattctttaatgattacttactttgtgtatttaaaaagatccatttaaggaggatggaagcatatatttgagtcagcttcattttggggaggtggcaagtggtagaaaactgttgactctcaagtgatcatcaatggctgctattatcatttttcttttactgtatttactgtttgtatttctaagtcagagagatcgtcaggtaaaataatgtatatgtttccctatcctcattctctttcttcttttttggcaaatgtactcttaagaacatcctcgtttgggaccaattataaaaaacctttacttttacgtagtacatgtttctcaagaaacagtaggtcacatgaaataaattaaaatccctaaaaaatatggcaattgttattctataggattaatgtccattttaaagcattaatataaacttrattaataatagtaggaatgatcaggtcctactactcatggatttcttttgagagcttaatttaaggagggaaccctyatctcagaaaaatttacatgactatgtagagatataaatttacatgtaatttcagaatattctgaagtctttaaaactttatttaagaaccttgcagtagtcccaaagtagttatactaacttatagaagaaacatccgtgtttttgctggagtgtatatggaccagtgataggcaagcacctaatagtgcaaaatttatatctgaaatggcatttgttcctttccttcttactttggcgtcaatgtctcgttcatgttgacttttttaagcaaagatcacttattcaccttggagttttaagtcatttatttccgatagccacagttgttattgaatttagcaaagcacaaattgccctgtagaaaaactgcatgctgtttaagtattttaatgttaaacattacaggacaaaccaattcttgctcccgaacctcttgtcatggataacctggactcaattatggagcagctaaatacttggaattttccaatttttgatttagtggaaaatataggaagaaaatgtggccgtattcttagtcaggtaagaaatgcattcattcacactaattkaaatataggaaaaacagttcctttgttgcttaaagctctgtaaattcttgacacttgtggataggtgttatgtggagaaaggaagttttagaacacaacattctgtagattccttgctgtgtgttaacaaaagaaactggaacttcaagtgagtcgartgtcatattctacaattaaaatatgatatatttttaaagacaaagtaggtggggatagagatatatagacaagggacaaacgatctagaattcatagaattaagcaaaagaaaatctgacacaagcctctaaaagaagaaaactgcctatttagagatactaatttattgtctgtaattatttttgatgactttttaaaaacttttgaatattacagagcttaggccttatcaaagataatacattgtgccaaaatgtgtttcctcctagtgttatgaaaaacacatcacatagagttatagaataatactgttgctgcataaccagcctttgagtattgttttctttaggctagactactctcaaggcttttcacataaataattacttgttttgctgaagaagaaagaaaacatgtagaaattaagaatttgaaaatgtttgttttaaaccataaaacaaaatgatggatttgctgtactatggaatagctatcgaaatacacacccttaattaaataaagaggatggtgygataatatgtatcagcttatcttcacatgttttaggtgtattcttataaatttgaataagtatcacagcagagatagtaaagaccatcaaacttgtgaatataagacttaggtaagaattcaagacccaacccagatctactggggccactaacacttctctgcaaaacaatagaagagaaatcactgaaatgctgatttctatgcagtgcatcagagatgagctttctttggaccactcaacacatgtctcaatgtggaacttcgtttggggtgagaatcctaatctgtgaagattgaagggaaaagatagcaggcctttcttctagtgtttgattctacaagcacatatggctgtctagtctaggggtacactaacattattgatggaatataagacacaaaattcttacaaagtctgtaaaatattcaattattgcctctgctagactctattctgtccatcaccatgttgaggaatataatggcagcccttgcactttgctaggagttgagagtcctgttcctcttcccttcctttcttcttggtgctaagcaatgtctcttacactagctgatcttcaggacagatttaagggtagctgttcagtccaattcaccttagcctcatactttagggatccccctgggagattgtgtattttctttctgaaacccatggaaaactgcaactttgagggagtgatctttcctgcaaataagcctgtaacggtgccacaggatgtggcaatgagtcaggaagcattttctctcttgwttttatttttttgctagggagtgtgttccctggtatagagagacacatctcatctcattttatatttgatgtatatctcacagactctcgaaaacttaatcttcatagtaactttagtgcaggttttttttttaaatatgtatyttatagaagaagaaactaaggcttaaaagaggctatgctactcttctaaagtcatatagtaaatattcaacccaggattccaaagcagatttatccatatcagaagcctagggcttttacattcattcaattgcttctcatatcttcataaaacaccttgacttattatgtcttcaagttctccaaatgaggattcatacctagtagaaaagtggttatgatagcagtcagttttacagcacaaatgacagcatacagaatttcattacaggtaccaaccactcccttgaagttctgtgagctgggaatgggagaaaacaatttgaccaaaattgctacaaaatattttctaagagtcatggataccagtagacaataaaaagattaaggataattaacaattagatccatgcaaaattcaataatgtatcttttgttccaatcatgttccaaaaacagagtaatatattgatatatgatccttattagtcactgtttatgttcctaatttcccagacattaaactttgaacaaatgtagtttcatatgacttgctaagtagaactttttgggatttttccttttatttgagtttataagaacaaaaatcatgarattttcattatggaaaatatgtatatatttttgccatagtgagactttaggacagctgaaatgaattaatgtgaacattccaataaatcaccttttggctgagactaaatggaaaaagtctcatttcaaaagatttttaaggagacatgtgcaatggaaataagttctcagtttcaatatacagcctgccttttgatgactatcattttaaccaacttaaaaggacacccttcagattttgaaaaggcatttaatgttttccgttaccgatatttacctagtttcaccactgttctctttatgtctgacatacacatagggatgtttcataagkctttgtcttcttttacaggtatcttacagactttttgaagacatgggcctctttgaagcttttaaaattccaattagggaatttatgaattattttcatgctttggagattggatatagggatattccttgtaagtatatgtgatttgtgaaataatacttttaaaatatgtcgaatttgctgtgggtaaatgggatagtgaatcattagcaggtagcacagaattacacatggtagacgctcaatatggagacatcatatggtgattaggaaatatcgcctgtgtgttagaatcctggcccctttacttttcagctgtgtgagaccctagggtttacttaagctctacatgcctcatttcttagttcataaaatgagaattatagtacctgattcatatgattgttaggatcaaataagattataattttaaagaggttattttagtgcctagcacacagtaagtctgacataagtccactttaatatggctattttttggaaataaataaatactaaatttattgcccatttaataacccatcccttttattgggtaaattcaacttttgttgtggcatctgaagagttaagtcactatatatgttttctccacgtaagataaagttggctggcgtttagagggacaggaggatgatggtctgatgaataaaatagaaaagacatatggaagtggttatggaaaaatgataagaaacacttaaaaaatcaggtaaatggaaagacccaaggaaaacacacaatcaagtattcaagctttgagtcttgtgggaataagtttcccatttataacaacaagaaatcggaacacagaggagatgttaaattttcattatgtagcatttcaggaatcatcgattataacacataagtaaaatggtcctatagtgctacgaaatatatggtttgggagacagtgtctataggtcgaaacagggaaattgtggagatgttcaaaaatcatgtaacacatgaaggaaataaatatatagaaagaaaaataatcaaacataatatattgatcggaacatgtcttggaaatatgttatttaaatcatattttagcttttaagcttttaaaagttttaaaagcttttatatttgcttatgcacctcagacttcagagtcccataactttttcktaattgtaaagagctgaaattacattaaaaaataattaatactaataaaacacaagtatttccaggaaggggtatcacatcaacttagggatttattatgagcatatttattgttttcaaaatcccatccacctgctacattggaatgaatatacacagctgttagtgtrtcatagaaaaagagaatgaaaaactgaatctacaagtgagattttctgaagaatrtgggaccaaaatacagacagagtaaggcagttggagtacgkgaaagaggagctcaacagtaccagggcccctgggaacatctggctgacaaatccatggaagttggaagagaaacatgaaaaaaggggtagttggaaaggatctcaagataagccttgctttcttaatacagttttcccagggcccaccctggttggatgccagtgattgacctaagtgttcacgatttctcgaaggtcaaggagttatataaataaacttttatagaaaggaagacactaaaaacactaaggaacagctaatcactagactgaatttccaaattcatgttatattttcaaatgtattttaatgatgtaattagccatagcaaagttccactgagttcaaattgatactaaactccayagacataactaccaactttttcacaggtggtatatcattaaatcatagttgaaagatggcaaatgtttaagtacaaaaataagttttcagattctaagatttattattcacttttatattttcttattacatttttatatgttacaagtaatagatattttttacccctgaaatagtgggttctttattccaggtgaaaagaacttgttgtaataaacctgcttgttctattagaagtcccagatagtctccataaagggaatttatttacatcttctcataggaaagctctagcttcatttgtgatcacttttatctaataatatttcatatgtgctgagattgtaaattaatatgaatatttattaaaatcttcacttatcattagttataatcagcacatacaaaaatttgctgtatacctacttgttttaatatttattttggactatatttctaatggtcctatctaaataaatccttagttgaaaagaagcataagaggaaccaaagttaaaatggggttggtttaactttaatatgataatgtgtgcaaatattagaaactaaatttcttattatagttctaagtgtacctttaacggttttcaagaaaagagggtaagtaggaaakcttttaaatttgtaattagaatccttacaaaaattgaagaatctagatttaaacagagaattaaagtaatttcatggtagtagcaatagaaagacaagaaatatggtcaactcaataatataaatgtgataaaaatgtatttgttcaatcaaacttaggataaattaatgtatggtgaatacccaattgcataaggagataaataatgtttggtgtcattcatagtccctttcagttgggcattttacttaataaaaaatccattcatattcattcatcgatccagttatttttgaaggtagtttttattttcaaagagtttcctctctaaagcatattctccctaacacctctcattctgatttaagtttgagaagtggggagaatgcctcagaagtacctgtgatcatgtagctatttcatggcagcaatgagaatagtcctgctcaacctatatttagttcagttcaattcagctgtacatgatgtgcccactgattttaaagctagatattgaagtgacatggtacatgctagaggggcagaactaccagagtattaactatattccaaaagaaaaaaaaatatttaaagtgttacctctattctttattacttctkcttaccctatggtgcataggagcatagacaaaattttaaatacaaaatatataaatttggatcttaaaatctgtgaatttacatacaactccaaccctccataccagctcacttcaactctgtgcttgagggaaaaggagaaagttgagaaaacaagtgtatcaagacggaagagggagatgggcggactctgggaaagaggtagggtgtaccatgtgctagtgtatgcatgtgcgtctatatgttattaaagagggcgagggggttgccacatgagtgaaggtgtcatcgagaaggctaggggtttgtccaaaatgcagagatgaaggaagaagtatgatgagaataaggataaaataaggatagctctgatagcatttcttatccttctcagttgcctaccctggccagaagaagaagaggaatctttgagcatttttatgtattacatagaaacctgtcagtaacttacattgaccttgctagcttctttcctgggtgtctttgctcctgggttgggttaccagagaattaatgacaagaacaatggagatgccagcacttggcataatactgagtacatgctaagtgaatatttgattaataaacatgtcactgactgctaacaggacagatggttttctattcttcaatctaagtgattgatgacagtattattctcctacacatacacacatataactagatgtatatgtttagataagcagctggatttggttagtgatttttttttatttagtacttttaaacctgtactcgaaagcaaaaggaacatgtttaaatatacatactgtctttacctagtttttaaatcaagattgtaccagcctcataaaatgagtttggcagcttttcttcttgtattttcggcactagattatttacttaggattaattgcttgttgaaagtttgttttttgtttttttgtttttttaaaataaaacattacctataaagttttctgggcctgggccttggggtgggggacagggtggattagagctcaaaaggattagagctcaaaagctgcaagttcacctggaatagatgttatcaattccttaccccaaacaggctctgccaacactgtgatactgccccccatccacctccgtactgctatgctcatgcacaggtttctctgacttgcaacaataatagtaactactggcatatagtaatcttcccagcttgcaacaggagaagataatttaagaagctggcttccaacatatctcccaaaagtggaaccctactcccagactgccattttcctaccataacaggtcattactatcttctaccgatggaggcagaagatattttattttattcttacaaatccagcattgattctgggagaaagctggtgatctatactagttctgtcttgttctacagcagcaatttattttacatgaataatgtttacacaaattacaaattcaccgtgtatctggccctttaaaatatatttcctaatgtaattgtcacaattgtaccatgaatttggcaatattattcccgtatttttaagataaataagactttttactctgtcttatttttaagataaggaagtggattttaaggaactcacccaagttagcatggataatattatagcagaggtaaaagcacacctgtcccaaatccagaaaattctagtatgatcaatttcataaatagcccaagtacagacataaaatatgatcgtaattctcttgcctgtgaattatttgtaaatgtaatgggctcatatcactggagatgggctatactcagggatatagatgtcaatcttaataaaattgctctttcaagtaccatataatattattactcatatttacgattgacacaggtatacaagttttgctattttctcctcaggaggctaggatttgagcctcctcctcctcctccttcccctcctcctcctcctcctccccctcctccccctcttccccctcttcctcttnnnnnnnnnnnnnnnnnnnnnnnnnnnnnnnnnnnnnnnnnnnnnnnnnnnnnnnnnnnnnnnnnnnnnnnnnnnnnnnnnnnnnnnnnnnnnnnnnnnnnnnnnnnnnnnnnnnnnnnnnnnnnnnnnnnnnnnnnnnnnnnnnnnnnnnnnnnnnnnnnnnnnnnnnnnnnnnnnnnnnnnnnnnnnnnnnnnnnnnnnnnnnnnnnnnnnnnnnnnnnnnnnnnnnnnnnnnnnnnnnnnnnnnnnnnnnnnnnnnnnnnnnnnnnnnnnnnnnnnnnnnnnnnnnnnnnnnnnnnnnnnnnnnnnnnnnnnnnnnnnnnnnnnnnnnnnnnnnnnnnnnnnnnnnnnnnnnnnnnnnnnnnnnnnnnnnnnnnnnnnnnnnnnnnnnnnnnnnnnnnnnnnnnnnnnnnnnnnnnnnnnnnnnnnnnnnnnnnnnnnnnnnnnnnnnnnnnnnnnnnnnnnnnnnnnnnnnnnnnnnnnnnnnnnnnnnnnnnnnnnnnnnnnnnnnnnnnnctgccagaaatttaacacctacccaggtgctacaattgccacattgaccataggtttcctctttcttctctgactagggaataggtgtttctctcatattctcattgtcattcttgttctctcctgtttctctcttctccttattttaagtattatgaagaaatgtaatctcttatactagagaaggaaacagtatcatggttggttagcagaaatacaatatataaagtataggtatttacaatatgtaaatacaatagaataaagcatactaatcagtgaagtattatgaggggtctgataaacaaaaaacttggaagaattgcacagaaaaggaaggtgagccaagagcacactgggcacgtggttatggtttgaaagaagttgaactgcacatgtggagtatgacccccttcccttgatgatggcattatgaccagatggcattatctggttaatggcatcatcaaccagatgatggcattatctggttttcctgtaggttttaactcttctaaatggcttagcttcctacattattatacaagaggcttttctttttctttttaagtatttcttagaactatattctgaaattagaatttctagatcagagaatataattgattgtggctttgaattttgcttgtggatgaaatctacatataaaagatatgttattgcagtgctttaagattgatacagaaaaatggtattatgttctattcccagattatttttgagtaccatctatcagagatgaaatattatgtctcatctagttgaagtatgtcatagctattacatttattctcattctctgcatagttttatgcaggagcatgaaaataagtaccagagtaaacattacacttttttcacacagtatgtttcctatatacatagtttgtagtcgactgttgacacagatttttccacttcagatacctgcatgcataataaatgttacaagtaaggtttttttcttgttacgatggatgttatggagttatggaagagtaatcaaataatatttgtcctagaaagtttggccaactttcatggaaatagtaaaatgttaggactaaactgtttgtccagtagatggcactcttagttcttggaccccaaagttcataaactgatgactgttcctgttcactggttacagatcataacagaatccatgccactgatgttttacatgctgtttggtatcttactacacagcctattccaggcctctcaactgtgattaatgatcatggttcaaccagtgattcaggtatgtacgaagtgaatctgcactgccttatgaaagatgggaacaagggtgtttttgtttttgttttttttcaaaaagaaagaagtcaagacaaataatgtcagtacttttttaaaaasttctttgactctcattttctcttctcagattctgacagtggatttacacatggacatatgggatatgtattctcaaaaacgtataatgtgacagatgataaatacggatgtctgtctgggaatatccctgccttggagttgatggcgctgtatgtggctgcagccatgcacgattatgatcatccaggaaggactaatgctttcctggttgcaactagtgctcctcaggtaaatctttagattttggttaggagaactaatttaaagatttctcaagaaagtgaagttcagtgtgatttataacaggcaccaagttaatataagccaaactatacatagtcttacgttgaaattctcagagaccgtgctaattctgaaaagaagccatggattcttccaagattctaatagcaggtatacaactttattatccatgggaatcatttctcagttttcttcttaggaagaaaacctacttgaattcatgttaatggacctctttaacaaacaaaaggcaacctatacaaaagcccctttctgaaaagattagagaaccaagcatttcttggacttttaagaatgtaaggtttctttgtatataaataccattcctttgaaatatattcaatataacaattatgattcttatgacattatctataggttggtaggattttaatatcaatttatttcattggaggattttttatttttttgcctaaacatagattccaaaaacagtgaataaatttaaagttcatcttggtgtatagttctaagtaaaaaattcatcactaagtatgtagacatacccatttatacaatcaaatttagcccctcatttatttaattagctgaacccaagttgctaaacattctgagatcctctgttcttctacaagatctagaggccaatttcattcaatattgacttttctgttttcttctttgcctcttctatcccattgctgttcatttccacagctcatcttataggctattctatagtttttcttgaatctatatacaataaaaattatctgataattttttcttgactatctaccttctttccacttgtctttcatacaccagaattattttttctaaatataggcaaaaatccactggccaggataatttaccattcagattattttacacgtctacatttttatatacctctatgttaatattctgtgcttagtgttttctttttgtcctatgtctttttatttctccataggctatacttgcacactagtgttcaggcattttgtaggcagcttcccttttaaaaaaaaatctctaataaannnnnnnnnnnnnnnnnnnnaattctctaataaaacttctctctgcattattagagaatttcagacaagtaaatgtcattttatgtctccgaatactagataaaaggtgatatttcctgtggagtggagtgagaatgttttaagtcatggacattttgggtattccattcatctttaatagctgtatgtgtttaagaggagataatgcttatgccagacagagaaagtaacctagttacctcttgaggtattgtggcattggtataattatatattatatttatatttacatatatatgtaaatataatttttttcttttytctttctccctcctcttttctatttgtatataatttttatgtttaaattcctgtaccctacaaagaaatctaaagaaaaaatcttttaaaaaatatctattaagataggcgagtgccccctcaaaagagtttggactaagttttcaaggaaaggaatttatcttacaaaaaggggaaatttaaccaagaaaaataatagagtcattgtacagtaataagtgattcttaataagcaggagttacgtgattacatttctttgttgtatgaataaaaagcaatttcaaaagcattgcatattctcatgatttttgtgattattttcttaaaaagttgaactcttaactgtcttatttgcctaggcggtgctatataacgatcgttcagttttggagaatcatcacgcagctgctgcatggaatcttttcatgtcccggccagagtataacttcttaattaaccttgaccatgtggaatttaagcatttccgtttccttgtcattgaagcaattttggccactgacctgaagaaacactttgacttcgtagccaaatttaatggcaaggtaaatagagctgtacccagttttcttttttttttcttttttttttttttttttgagacagagtcttgctctgtcgcccagactggagtgcagtggcacgatcttggctcactgcagcctctgcctcctgggttcaagtgattctcctgcctcaacgtcccgagtagctgggattacaggctcatgccaccacgcctgcctaatttttgtattttgtttttttagtagagatggggtttcaccatgttggccaggctgctctcaaactcctgacctcatgatccacccgcctcggcctcccaaagtgctgggattacaggtgtgaggcaccrtgcccggctgcatcagtcttcattttatagacacattgaaagatatcatggaagcaaactgttgaacaaaacatgttactatgaactcccatatttcaaatgtgaaaatggaatacaataaaatgtttaaccagaagcagacatataggtattgatctgaatctagatgcccaagaagctgagatgctgtctctatagattctactctgtgctacagaggaataacacattctgtcattgtggtttttgtttgatttaatttgttttcatctctatggtatatttgtataaattatctggcagcagtacagatcaaaaacttgaagcagaattttatacctcaaaagtaaatgcccaaatattaagttatgacaattttttatgaactgtaactatattattttaatagtaattgataataaggccaagcacaatggctcacgcctataatctcaacactttgggaggccgaggtgggtggatcacttgaggccaggagttcgagaccagtctggctaatatggcgaaacaccatccctactaaaaatacaaaaattggccaggtgtggtggcgcacccctgtagtcctacctacttgcgggggctgaggcaggaagattgcttgaacccaggaggtggaggttgcactgagccaagactggaccatgacactccagcctgagagagagggcaagactctgtctcaaaaaaagaaaagagaagtaattgattatatatgccaatttaaaaaagcatttgttgctaattcaataattaatgatttttaaaattttcatttttgtaggtacatggtaggtatatatatttatgggttacattaataaattcatataatgtataataatcacaacagagtaaatggggtatctgtcacctcaaacatttatccattgtgttacaaacaatccagttatactcttttagttattttaaaatgtataattcaattatttttgacacactcaccctgtcacccattattataattttatccataattcgtttactttttttgtgaactatttttaccattaatttacacagccaataacatttttaagtagctagaggttcccaattatttgrtattatgatccctatataatatgaagacaataaatgttctattgtttttctcttctcttcaacttttgtttttatcaaagcaaaacatatattaactttatctctcaaataggtaaatgatgatgttggaatagattggaccaatgaaaatgatcgtctactggtttgtcaaatgtgtataaagttggctgatatcaatggtccagctaaatgtaaagaactccatcttcagtggacagatggtattgtcaatgaattttatgaacaggtaactgaccactgyttaatacagcttaatctgtacttacaggttgctcatgaattgctcaaagcttctaacagctatgaaagtatgatcactctattttatattcatacttttgtcagaaaatgcactggtcaattttgatcaggagacaaaaagtgacgtataaaaattggactaaaatataatcatagaactctatgataaaagttatttgcaagcatttggggggaagaagatattgagatagtggaagtcagatgttaggaagatccttgaaatactgtttttttatagatttatttattatcatagaaggtagtttaaatgtatatggagtagcttgtatgtatatggtagtttaaatgtatatgcatatcacattaatttcacttactttcctaaaaaatttatttattatcatagaaggtagtttaaatgtacatggaatagtttatatgtatatgtatatggtagttcgaatgtatctgtatattagattaacttcacttttgtaaaaaaattaataagagcattatgtgaaaaagctaaaaagaaatagacatttcatttgacatgataactaagagttaacagactactcagaaagctaccacaattacataagcygggggtgatcctcctgacattaccctacacccatcagaatgcacttgaaccttcctgtttggcactgtgaaccactcttaaaaagaatgtggaggtgaaggagcatgcataaaggacaggaataagtgacagaaaagcatgtggaaaaaaatgaaggtatttactcttggggaaatataactgtcttcagatatttaaaagagtgacatactaatttagaaatcggttaatcaacattgctgtggagattaaagaagataaattatataacatacttagcacaggatctgattcataaaaaaagttagatccctctctactgccctaaaaaaggtatgaatataccagtctatagaagttattgggaggtagtgttcaggtcaatgtcagaaagaaatttatattgctaaaggtatccaaaaaataggctgagacaccatattaatggtaataaattgactgtcattggacatgtttaaacaagagattagaatgaaattttatggttactataggtaggattcatatatagaatgaaagatttgttttttttattttattatactttaagttttagggtacatgtgcacaacgtgcaggtttgttacatatatatacatgtgccctgttggtgtgctgcgcccattaactcatcatttagnnnnnnnnnnnnnnnnnnnnnnnnnnnnnnnnnnnnnnnnnnnnnnnnnnnnnnnnnnnnnnntgtgtgatgttccccttcctctgtccatgtgttctcattgttcagttcccacctatgagtgagaacatgcggtgtttggttttttgtccttgcgatagtttgctgagaatgatggtttccagtttcatccatgtccctacaaaggacatgaactcatccttttttatggctgcatagtattccatggtgtatatgtgccacattttcttaatccagtctatcattcttggacatttgggttggttccaagtctttgctattgtgaatagtgcctcaataaacatacgtgtgcatgtgtctrtatagcagcatgatttgtagtcctttgggtatatacccagtaatgggatggctgggtcaaatggtatttctagttctagatccctgaggaatagccacactgacttccacagttgttgaactagtttacagtcccaccaacagtgtaaaagtgttcctatttctccacatcctctccagcacctgttgtttcctgactttttaatgatygccattctaactggtgtgagatggtatctcgttgtggttttgatttgcatttcactgatggccagtgatgatgagcattttttcatgtgtcttttggctgcataaatgtcttcttttgagaagtgtctgttcatatccttcacccactttttgatggggttgtttgtttttttcttgtaaatttgtttgagttcattgtagattctggatattagccctttgtcagatgagtaggttgcaaaaattttctcctaaaaccataaaaaccctagaagaaaacctaggcaataccattcaggacataggcatgggcaaggacttcatgtctaaaacaccaaaagcaatggcaacaaaaaccaaaattgacaaatggggatctcatcaaactaaagagcttctgcacagcaaaagaaactaccatcagagtgaacaggcaaccyacagaatgggagaaagttttgtgtttttaaaacatcatgaaatcatgtattgcctttcctaagaatgggattaattcataaatctcgaaatatggaaatgcagaaaaatgtaaattaaagggaaaattcatgtataataataccacttcttaggcataattgttgctgatattttgggatatttcctttattaattttgctagataactgctggttaaaaatctcccttttttcctcagaaacatttgaagcacttcaaaataaaacatttgtacagtaatattattaaacatatagataaataagaatatcagaaaccacacaatcacaggagatatattaaaattcaaacaaaatctgggataaggtaaccccttgaattgagcaataaattctttaaagctttctggaagccaaagcaaaaaaaggaaaataggctacatttatatatttttaaaaaaattgttctcactattgcatttttttttttgagatggagtctcactctgtcaccctggaatgcagtggcacgatctcagctcaccgcaacctccgcctcctgggttcaagtgattctcctgcctcagcctcccaagtagctgggattacaggcacctgccactacacccagctaattttttgtatttttaatagagacggagtttcaccatgttggccaggctggtctcgatttgcccactttggcatcccaaagtgctgggattacaggcgtgagccaccacgcccagcctcaccattgcattttcgtgcatttatattctcatataaaagacactgacttgtgtgattaaaatatcatctacttatacattagaatttagactttctgtatttctccttgataaaaagcaaaaacctcaagttcagaaaagtactaattagcaacagtgtttctataggaaccttagcacttgaggtaggatcctttagctgtcaagtaaagaagtttgtgcattaatgcctggggttttacatatttacaaatttcagatgccaggtgaatgttgacttcacttgtattttatttctagggtgatgaagaggccagccttggattacccataagccccttcatggatcgttctgctcctcagctggccaaccttcaggaatccttcatctctcacattgtggggcctctgtgcaactcctatgattcagcaggactaatgcctggaaaatgggtggaagacagcgatgagtcaggagatactgatgacccagaagaagaggaggaagaagcaccagcaccaaatgaagaggaaacctgtgaaaataatgaatctccaagtaagttctaaaacctagttctaatgtgttttccctgggattgctttcttactttagatgaattttatgcttcttatgaaatacacaatacttcaagtctaaacatcatttgcggagtttgactacggatagctcccttccccaatatcataataatagaaatcccagactatggaatctataataataacacatatgatacaaagatatcttctccgtcatgaagtcatgaagttagaaaaaaataataataaggagttgaagcctattcttcagggtatctggttttttgtttgttttttgttttttgttttttgaggcagagtcttgctctgtcacccaggctggagtgcagtggcacgatctcggctcactgcaagctccgcctcccaggttcatgccattctcctgcctcagcctcctgagtagctgggactacaggtgcgcaacactacacccggctttttttttttttttttttttttttgtattttgagtagagatcgggtttcaccatgttagccaggatggtctcgatctcctgaccttgtgatctgcctgcctcgacctcccaaagtgctgggattacaggcgtgagccaccgcgcccagctgcttcaggttatgttagcgatttaaaagtgaaagaatttcagttaccataaagaccagtcataggtttttattggcttggttaggggaactccatgtgaatagataggaggtagtattcatttgttcattcaacagacatttattgagcatctgctctgtgccaggtatccttccaggtactagagatagagttgtggggaaaaaaagacaaaaaataaaataaaatccttgcccttatagaagtacattctagtgggatcagtagacaataagcaaaacaagtgagtatatctatagtatgttaaatacagtattatttactgtagtgataaatgctgagaaatatgagagtaaaaataaaaggagggagatatgaaatattatagagataggttaaaattttaggtaagatatccagggataggaaagatgtaaagcagggaaagatttgtaaaaagaaaaagaaaagacctgcaagaagcaagggagtgctccctggggctgtatgtggaaagaggattccaaagagaggagaaagcaacctgtgcaaaggtccggggatgtacattgggtggggtgttcagggagcagcaggagaactgggatagctggagcagcaagacagaggcagccgggaacgaactgtccaagggagagaatacagtcatgggttcttagttgctgtttctggttgggccagtaaagccccttcctcatcccactgttctgcttatcactagagacagaaactaaaaaccatggtttcaggtgctaaaagcctaaaacaaaacaaaacagaagaacagcaacaacaaataagtcagcctggacaagcttggaaggtgggactctgtaggtcacggtaagtgttgtggcttttactctgagtaagatgggaaatcgtcagtggttttgaacggaagagttagtagactcaacttacattttaactggactgcttcagctgctctattgagaatatgcttggggttgagaagggagcaaggatagacatagggcggtcagttaggagaccattgaaattatccaagtgagagatgcctgtgactttgaaccagggcagtagcaacagtgacagtgacaacctatcacatgtgataattggctggagtgcatcatgtggccaatctaacctatttagcttaattgactatgaaatcatttttatttatgcctctaaagctactctcctatttatcctgtcatgaaacaaatagtgactaatagcataattagtaaaaatccatgacccttgcaatgatattgcacaaatactgctcctaagaacatagtatgtgatttctgtctacctttacagataaagtacaatcttaatatcctcaaggttcttaccaaaaatacaaccagtgaaagacattctgatcatttcgtgcctatttttatcacagtcaggataatgcacaacttggttcattccaaccatcttgtaaggagattaaccttctactgatccattttgctctcatataagcaccttgttgtaggcacacataagcaaacataaagaagtccttatcaattatgaacttatgaagtaaaattttgcaaattgagttttagatcagatctggcctgttaattactttttgtagaatgggggaaaattaaagttgtttttcttcaatatgctactgtcaaagtaattatatttcatttatctgatgcaaataaaaagacttccattagaaaatttgtactaatcttgagattcagagctagaagccaagacttggaattcatgggttattcattcatttttttcacttaataaacatgtattagttttctctttttgtttgttttcatttcaaagagccaggtagtttgctgtcttactaagaataagacagtttttccactgaatgaaggtattgtcagcttagcctctggaaaagctttgttcccaggggccctgacttactgctctttgaactcaaacacatggaaaatacagacgcacagatccaggcattgggaattgaaggacccaggccaggagacttaacaggctcaacttgtcaacctagcctttagcagcaaatgctacaaccacatattccatttctttctgttctgtagggttgggttgtcataccttccmgtttttatcaagttcactaaagcaggaatgagagactttttgggttctgtttgctcatgccttccaaaagttaactgaccacattatattacaatttaaaaatatcccatccacaatgatttgatactgtagctttggaaatattatctttaaagtatttctttacaaccaagaaaatgataaatatggagcaacattagtatttaccaaatattggccacatagagtaacagaattttagaaatgaagggggaatcaatgcttatcagttagctgcctcactttacatatattaaactaaggctcagaaatttaaatgacattgcaaggttgtagaaccagaaagggaacctaggtctcttaatttttaacttcaatgcttttggctctcagtaatgttaatatcagaattcatactggctaaaatggttaccttgactttgcctaatacttaggtttcagaaaaaaataaatatgcacagataacttctgtagtttgtaaaacttggagatgtcccaggaaacagaataaaatgtttcaatatggtatcctaggaaaagaaggtttttatcccaccttataattaaatctgaaagattcctacagtgaactaagaggttyctaatgaagtactaagctgcatttagaattggagcaatgaaaggctctttgttctcctttcaaaaggttccagtacagaacaatttggctcccaatacaggcatgttttagaccacctgcaggctctaatctacgcaaatttatttggtacaaactttcttctacgtcaccttcttattcagtataattccagagaggtttattgctaacatttaacagtattaataagagaacagttgctctcatggggactgccctggaaggaaaaaagaggaaaattgagcttttgttagcttcttccctatgaatgcactgccatcaatgtgtataactttaagatgaaataatcaccttaaactgaagagtgtttgctacaactgtgattcaaacctgtccttcagacaggggtcctctgtaactctcttgattcaaaggattagcttaaaaagtatattaacatttaaacatttctcaacagaatttgatttataacaaaaacgaagtagaaatagacaagtagagatagaagagtaatttttaatttgctttaaaaaatctgatgtattaatgtattttattgactttcatagaaagaattcaaatttakttaaatttcaattgtatctactgcccttgttaggaggctttcaaatggaagaattgatataaggggtcttggcctgtgccccatacacttttgcctatgtcccagttcttcaaactttgcttggaatactgctagctccttttcacccagtgttatttaattctcattacttacatccagcccaggtaccaggtcctttaaaaaaaaaattctacctaattttccacagtttgtgtcatttgtgttgccatggtttgatgtatcaaagagaaattgcaccagacatttgttaaaaatggcaacgaaggcgttattcaagactactgtaataggggagacagattgaactctgttgaagcaaaaggtgggagaattgttcaatgctgctgtgagctagtgaaaaagtgctggaggatgttatgtgagcattggttagtatgattaagccacctgttaattggtacttactaaagttaggctcctacctcccaacagagactaggagataggcctgcctgctggcctacctttcttctttccttccatccttccttccttcatttaaatcttttttaaattttaaaatttaaattttattttgtaagactgcaaagctaattagaggctgggagaagatttatctatattccagaggggcagagaaagaatttgctattacaggttttctaaagtaaatgttctaacaagagggaggtcaggggcctatagtctagaagtctaaaatagtgtcaaactgagagaaatggcaagcccatcttggtcacaagaatatgtctgtcataaaacatagcacatgtatttcagtttttgtcttcttggcactctctcttacagagagactgtaaactcctttaaggcaagatctgagcttaattgatctgtgtttccaaagtatcctggaaagtatttgccagttagtttgagtccatctcatgaagaaattatgaatatcataatttttttttccttttgactctgcctgtgttcatttccctcagcactcattcaatttaataattgtcattctgtgtctrtatggttcaaaattaattcaagataatttaatgtcctttttattcactrtgttttaaaaattaattttattctgtacagtacaagaaatttctgcagtatatcaaaataaaactgttaaaagaatgactagcccttccacaaagatgttggcagatgacctccaagtttctttgtcacccccatagaaattggctttttttctttcattattgtgctattattaagacttttcttttttttcttgctcccagagtaagtcatatctacttcattaaatagacccaaatatcccttttgatcttcctgctaacttgtactgttttttttaattgtttatttacttttgtagagacagcagtctcactttatttatttctgtagaaacaggacctcactatgtttcccaggctggtttggaacccctgacgtcaagtgatcctcttgcttcagcctcccaagtagctaagattacaggcagcatgagccaccatagccagcatgaactattaactctttaatgcagtctcaattagatcagcatctcctgtagaccactttttcgtattagttttatttttaccacttatcaatacttcatcatttacctggaaatgtggaacaaaaactagagagaaaattattcatttagtaaacttttactgaatgctttagtaaagtctaggtcttcacagatattacatatacacaaaagtaaagagaaaagtccatataccaggtgatatggtttggctgtgttcccacccaaccctcatcttgaattgtagttcccataatccccatgtgtygtgggagggacctggtgggaggtaatcgaatcataaggggagttacccccatgctactgttctcatgacagtgagtgacttgtcacaagatttgctggttttataagaggcttttccccctttccttggcacttctctctttgtatgaccatgtgaagaaggatgtttgcttccccttccaccatgattataatttcctgaggcctccatagccctgtcagtcaattaaatctcttttctttgtaaattactcagtcttgggagttctttatagcagtgtgaaaatggactaatacagtaagttggtaccagaagtggggtgctgatataaagatacccaaaawtgtggaagcaactttggaacacagtaacaggcagagattggaacagtttggagggctcagaagaagacaggaaaatgacagaaagtttggaacttcctggagattggagggtcatatggtttggctgtgtctccacccaaatctaatcttaaattcccatgtgttgtggagggacccggtgggagataattgtatcatcrtggcaagtcttttctatgctgttctcgtgatagtgaataagtctcacaagatctaatggttttaaaaagaggagttcctttgcacaagttctctttttggctgctgccatccatgtaagatgtgagttgcttctccttgccttcctgtatgattgtgaggcttcctgagcaacatggaactgtgagtgagtgctcaattaaacctcyttcctttgtaaattgcccagtctcaggtatgtctttgtcagctgcatggaaatggacgaatacagtaaattggtmctggtagagttgggtgctgctgaaaagacaaccaagaatgtggaaacgactttggaactgggtaacaggaagaggttggaacagtttggagggctcagaagaaaaaagaaaatgtgagaaagttagtttggaattttctagagacttgttgaatggctttgacaaaaaatgctgatagtgatatgaacaatgaagtccaggctgaggtggtctcagatggagatgaggaacttgtcgagaactggagcaaatgtgactcttgttctgttttagcaaagagactggcagcattatccccctgccctagagatttgtggaactttgaacttcagagagatgatttacggtatctggtgggagaaatttctaagcagcaaagcattcaaaggcaacttgggtgctcttaaaggcattccattttataagggaagcagaacataaaaattcagaaaatttgcagtctggcaatgcaatagaaaagaaaatcccattttgtgaggataaatccaagcgagctgcagaaatttgcataagtaatgaggagccaactgttaatccccaagacaatggggaaaatgtctccagtatatgtcagaggtcttcatggcagcccctcccatcacaggcctaggggcctaggaggaaaaagtggtttaatgggctgggttcagggtccctgagcagtgtgcagcctagggacttggttccctgcatcccaaccactccagttgtcactgaaagaggccaaggtacagcttgggctgttgcttgagagggtggacgcctcaagccttggcaccttccatgtggtgttgagcctgtgagtaaacagaagtaaagaactgaggtttgggaacctctgcctatatttcagagggtgtacggaaatgcttggatgatcaggcagaagtttgctgcaggggtggggcagtcatgcagaacctctgctagggcagtgtggaagggaaatgtagggtcagagctaccacacagagttactactggggcagtgcctaatggaactgtgagaagagagccactgtcctccagaccccagaatggtagatccaccaacagctggcaccgtgtgcctggaaaagccacagacactcaatgccagcccatgaaagcatccatgagggaggctgtaccctgtaaagccacaggggcagagctgcccaacactataggatgcccctctttgccttccaccatgcttgtcaggtctctccagccatgtgaaactgtaagtccaataaacttctttcttttgtaaattgcccggtcttgggtatgtctttatcagtagcatgaaaacggactaatatggaggactcagaagacaggaaaatataggaaagtttggaacttctagagacttgttgaatggcactgaccaaaatgctgatagtgatatggacaataaactccaggctgaggtggtctcagataaagatgaggaacttgttgagaactggagtaaaagtcactcttgttttgcttaccctgcagagccacaggggcaaagctgcccaagaacacctcctgcatcattttgacctggatgtgagacatggagtcaaaggagatcagttttgaactttaaggtttaatgactgccctattgaattttagacttgcatggggcctgtagcgcctttgtttcagcaaggaaactggtggcattttgcyctagccmtagagatctgtgaaactttgaacttgagggagatgatttagggtatctggccgaagaaatctctaagcagcaaagcactcaagaggtgactttggtgctattaaaatctctcagttttatgtattcagaaagacatggtttggaattggaacttatctttaagagggaagctgagcataaaaattcagaaaatttgcaacctgaggatgtgatagaaaagaaaaacccattttttgaggagaaactcaagtgggctgcagaaaatttgcataagtaacaaggagccaaatgttaatcaccaagacaatggagaaaatgtctccagggcatgtcagagaccttagtggcagtccctcctatcatagacccagakgcctaggcagaaaaaacgatttcacaggccaggccccagaccctctgctgtgtgcagcctagggacttggtgccgtgagtcccagctgtttcagccatggcagaaaggggccaatgtacagctcaggttgtggcttcagagggtgcaagcccgaagccttggcaacttccatatcatgttaggtctgtggtgtgcagaagacagaaattgaggtctgggaacctccacctagattaaagaggatgtatggcaatgcctggatgtcctggcagaagtttgctacaggggtggagccctcatggagaacctctgctagggcagtatggaagggaaatgtggggttggcgccaccacacagagttcctactggtgcactgcacagtggagctgtaagaagagggccattgtcctccagaccccggaatggtagatccaccaacagcttgcactgtrcacctggaaaagccacaggcagtcaatgccagcctgtgaaagcagctggaggggaggtgctgtaccctgcaaagccacaggggcaaagctgcccaaggctgtgggagcacacctcttgcatcattttgacctggatatgagacatggagtcaaaggagatcattttttaactttaaggtataacaactgcccttttgaattttagacttgcatgggacgtgtagcccctttgttttggcagatttctcccatttggaatgattgtatttacccagtgcctgtaccatcattgtatctgggaagtaactaacttgcttttgattttgcaggtttataggcagaaaggacttgccttgtctcagatgagaccttggacttggacttttgggttaatgctggaatgagttaagacattgggggacttttggaaaggcaagattgtgttttgaaatgtgaggatattagttttgggagaggtgaggggcagaataatatgatttggctatgtcaccacccaaatctcatcttgaattgtagtttacataatctccatgtgttgcgggagggacccagtgggaggtaattgaatcatgggggtggttattgtcatgctgctgttcttgttataatgagttcttatgagatctaatggttttgtaagggacttttccccctttgcttggcacttctstcttcctgccaccatgtgaattaaggacatgtttgcttccccttccaccatgattatgtttcctgaggcctccccagccctgtggaactgtgagtcaattaaacctctttcctttataaattacccagtcttgagcagttttttatagcagcatgagaatggactaatacaccagggaaattcacaatctaatgggaggatcttagctgaacttctgaactcttggctcaagtctaaaatcgtcacttagatgagggtactgagagttaaatgatattctggttgcttggaaaagaacagacctctcttctaagctgtctaccagctgcctactttacctctctactcagaggtcttccagacacttcatgttcagaatacctctattcattttctgctgatatggttttgctgtgtccccacccaaatctcattttgaattgtagctccaataaytctcatgtgttgtggaaaggacccaatgggagacacttgaatcatgagggcagtttcccccatattgttctcctggtactgaataagtcatggatctgatgattttataaggggtttcctcttttgcttgactctctcattctctttttgcctgacaccatgtaagacatgccttttgccttctgccatgtttgtgagacctccccagccatgtggaactcttgagtccattaaacctcttttttctttgtaaattatccagtctcaggtatgtctttatcagcagtgtgaaattgactaacacaccctcaaatatactcctcatccaaccttccctttctcagtacatcttaccaacatactcaactgctcaggccagaaaacagggttgtctctgattcctccctcttaattccctacctctaatcagttgccaagtcctgttgattctcccatacaaatatatctcatatttattgacttttcttcattttcattacccctgtcctaatccagtcaccacctccatacaatattgtaccaactgggccatctccctccctttctgctgactttcaaagactccataagactcagtataaatgtacctgcttgttcactattttcctactagagtaaaagcctgctgctggcaagcatcatatttatcttgtctgtcagagggtcactagaactgaggacaacattttggtacatatcgggtgattcataaatagataaggaatttagaaacctcaatagtgaatgctgacattaaatagtcttctttgaaatatatttttttctgtttaaattgggtttattatttttcctcaattaaaggatgtaattctgtgaaaatttttcttaatatttgcatgttgaaaactttgaatcatttggtcaaagaaaatgtaatgtatttcttttttaaatgcatacgtgctgatgtataagatctgtacaggtttgtccaaggctccctcacagaccctatagtctagaagagaaactatttggaatatatgaaaataagatttgagtttattttttttaagtagggtactcatttattcagattaatagacagaagcaaataattttccaaagtagatgtaaaaaatgtacattcctataagcaatatattagttctaattgttaaattcttcgtctacacttgattttttatagtcattttcattttagctattccaagtaggcatagagtgctcttatgttatagttttcatttgcatttccctgtcttatgtaatatgcaactttttgtatttttaatcaatatatatttgtacatatttatgtggggcacatgatattttgctacattcatcaaatgtgtaatgattaaatcaggatatttagartatctgtcacctcgagtatttgtcatttctttttttttttttttttttttgagaccgagtctcagtctgtcacccagtctggagggcagtggcacattctcagctcactgcaagctcactccgtctcctgggttgaagtgattctcctgcctcagccccccaagtagctaggacaggcatatgccaccatgcccggctaatttttgtatttttagtagagatggggtttcaccatgttggccaggctggtcttaaactcctgacctcaagtggtccatccgcctcrgcctcccaaagtgctgggattacaggcatgagccactgcacccggccatatttatcatttctatgtgttgggaagtcccctcttcccactattttaaagtatgcaatacattatttttaacaataatcaccttactctgctatcgaagaacttatttattctaactagtatgtttgtgctcattaatcaatatctcttcattcctcctaacccccaaccatacacccttctcagcttctgatgtctgtcattctaccctcacttccatgagatcaacttttctagctcccacataagagtgagagcatgagatatttgtctttatttgctagacttatttcatttaacataatgatctccagttccattaatgatgctgcaaatgtcataattttattctttttatgtctgaatattattccattgtgtatgtataccacattttctttatccattcatcagttgatggacacttaggttgattccatatctttgctattgtgaagactgctgcaataaatatgggggtgcaattatctttttaatatactaatttcttttcctttgataartacccagtagtgggattgctagatcatatggtagttctcttttgagattttgagaaatctgcatactgttttccatagtggctataccaacttatatacctacaaacagtgttatgagttcccttttctccacatccttgccagcatctgttgtttttctgtttttagtaatagccattctaactggggtaagatgatatctcattgtggctttgatttgcatattcctggtgattagtgatattgagcattttttcatatacctgttggccatttgtatgttttcttttcagaaatgtctattcatgtccttgcccactttttaatagaatttttttgtttttgttttttaactgttgcttgattttcttgtatattctggatattagttccttgttgtatgaacaatttgcatatattttcttccattctatagattttctcttcactatgttgattcatttgctatacagaaggttttcgtttttagtttagtcccatttgtctgtatttgtttttgttgcctgggtttttgaggtcttaatcataataatctttgcttaggtcaatgtcctatagaacttcccttatgttgtcttctaacagttttatagtttttggtcttacttaagtctttaatctatcttgagttgatttttgtatatagtgagaaatggagtctagtttcattcttctgcatgtgaatatccaattttcccagcaccacttattaaaaaagatgtcctttcttcaatatatgttcttggcacctttgtcataaatcagttggctataaatacatgcatttatttctggagtctatgttttattggtctatatgtccatttatatactaacaccatgctgttttgtttactatacccttgaagcatattttgaagtcaggtagtgtggtgcctccatctttgttcttttcgttcaggattgctttggctactcaagctcttttttggttccatagagattttggaattgtttttcctgtttttctgaataatgtattggtattttaaaaataaagattgcgggggaggagccaagatggccgaayaggaacagctccggtctacagctcccagcrtggtggatgcagaagatggtgatttctgcatttccatctgaggtaccgggttcatctctctagggagtgcgagacagtgggcgcaggtcagtgggtgcgcgcaccgtgcgcgagccaaagcagggcgaggcattgcctcacttgggaaacgcaaggggtcaggkagttccctttcccagtcaaagaaaggggtgacagatggcacctggaaaatcaggtcactcccacctgaatactgcgcttttccgacgggcttaaaaaacggcgcaccatgagattatatcccgcacctggcttggagggtcctacgcccacagagtctcgctgattgctagcacagcagtctgagatcaaactgcaaggcggcagtgaggctgggggaggggcgcccgccattgcccaggcttgattaggtaaacaaagcagccaggaagctcgaactgggtggagcccaccacagctcaaggaggcctgcctgcctctgtaggctccacctctgggggcagggcacagacaaacaaaaagacagcagtaacctctgcagacttaaatgtccctgtctgacagctttgaagagagcagtggttctcccagcatgcagctggagatctgagaacaggcagactgcctcctcaagtgggtccctgacccctgacccctgagcagcctaactgggaggcaccccccagtagaggaacactgacacctcacatggcagggtactccaacagacctgcagctgagggtcctgtctgttagaaggaaaactaacaaacagaaaggacatccacaccaaaaacccatctgtacatcaccatcatcaaagaccaaaagtagataaaaccacaaagatggggaaaaaacagaacagaaaaactggaaactctaaaaagcagagcrccaatcctcctccaaaggaacgcagttcctcaccagcaacggaacaaagctagatggagaatgactttgacgagctgagagaagaaggcttcagacgatcaaattactccgagctacgggaggacattcaaaccaaaggcaaagaagttgaaaactttgaaaaaaatttagamgaatgtataactagaataaccaatacagagaagtgcttaaaggagctgatggagctgaaaaccaaggctcgagaactacgtgaagaatgcagaagcctcaggagccgatgtgatcaactggaagaaacggtatcagcgatggaagatgaaatgaatgaaatgaagcgagaagggaagtgtagagaaaaaagaataaaaagaaacgagcaaagcctccaagaaatatgggactatgtgaaaagaccaaatctacgtctgattggtgtacctgaaagtgatggggagaatggaaccaagttggaaaacatgctgcaggatattatccaggagaacttccccaatctagcaaggcaggccaacgttcagattcaggaaatacagagaacaccacaaagatactcctcaagaagagcaactccaagacacataattgtcagattcaccaaagttgaaatgaaggaaaaaatgttaagggcagccagagagaaaggtcgggttaccctcaaagggaagcccatcagactaacagcagatctctcggcagaaaccctacaagccagaagagagtgggggccaatattcaacattcttaaagaaaagaatttccaacccagaatttcatatccagccaaactaagcttcataagcgaaggagaaataaaatactttacagacaagcaaatgctgagagattttgtcaccaccaggcctgccctaaaagagctcctgaaggaagcactaaacrtggaaaggaacaaccagtaccagctgctgcaaaatcatgccaagatgtaaagaccatcgagactaggaagaaactacataaactaacgagcaaaataaccagctaacatcataatgacaggatcaaattcacacataacaatattaactttaaatgtaaatggactaaatgctccaattaaaagacacagactggcaaattggataaagagtcaagaccaatcagtgtgctgtattmaggaaacccatctcacgtgcagacacacataggctcaaaataaaaggatggaggmagatctaccaagcaaatggaaaacaaaaaaaggcagggattgcaatcctagtctctgataaaacagactttaaaccaacaaagatcaaaagagacaaagaaggccattacataatggtaaagggatcaattcaacaagaagagctaactatcctaaatatatatgcacccaataaaggagcaccaagattcataaagcaagtcctgagtgacctacaaagagacttagactcccacacattaataatgggagactttaacaccccactgtcaacattagacagatcaacgagacagaaagtcaacaaggatacccaggaattgaactcagctctgcaccaagcggacctaatagacatctacagaactctccaccccaaatcaatagaatatacatttttttcagcaccacaccacacctattccaaaattgaccacataattggaagtaaagctctcctcagcaaatgtaaaaggacagaaattataacaaactatctctcagaccacagtgcaatccagctagaactcaggattaagaatctcactcaaaactgctcaactgcatggaaactgaacaacctgctcctgaatgactactgggtacataacgaaatgaaggcagaaataaagatgttctttgaaaccaaggagaacaaagacacaacataccagaatctctgggacgcattcaaagcagtgtgtagagggaaatttatagcactaaatgcccacaagagaaagcaggaaagatccaaaattgacaccctaacatcacaattaaaagaactagaaaagcaagagcaaacacattcaaaagctagcagaaggcaagaaataactaagatcagagcagaactgaaggaaatagagacacaaaaaacccttcaaaaaattaatgaatccaggagctggttttttgaaaggatcaacaaaattgatagaccactagcaagactaataaagaaaaaaagagagaagaatcaaatagacgcaataaaaaatgataaaggggatatcaccaccgatcccacagaaatacgaactaccatcagagaatactacaaacacctctacgcaaataaactagaaaatctagaagaaatggataaattcctcgacacatacactctcccaagactaaaccaggaagaagttgaatctctgaatagaccaataacaggatctgaaattgtggcaataatcaatagtttaccaacaaaaaagagtccaggaccagatggattcacagctgaattctaccagaggtacaaggaggaactggtaccattccttctgaaactattccaatcaatagaaaaagagggaatcctccctaactcattttatgaggctagcatcatcctgataccgaagccaggcagagacacaacaaaaaaagataattttagaccaatatccttgatgaacattgatgcaaaaatcctcaataaaatactggcaaactgaatccagcagcacatcaaaaagcttatccacaatgatcaagtgggcttcatccctgggatgcaaggctggttcaatatacgcaaatcaataaatgtaatccagcatataaacagagccaaagacaaaaaccaaatgattatctcaatagatgcagaaaaagcctttgacaaaattcaacaacccttcatgctaaaaactctcaataaattaggtattgatgggacatatttcaaaataataagagctatctatgacaaacccacagccaatatcatactgaatgggcaaaaactggaagcattccctttgaaaactggcacaagacagggatgccctctctcaccactcctattcaacatagtgttggaagttctggccaaggcaattaggcaggagaaggaaataaagggtattcaattaggaaaagaggaagtcaaattgtccctgtttgcagatgacatgattgtatatctagaaaaccccattgtctcagcccaaaatctccttaagctgataagcaacttcagcaaagtctcaggatacaaaatcaatgtacaaaaatcacaagcattcttatacaccaacagacaaatagagagccaaatcatgagtgaactcccattcacaattgcttcaaagagaataaaatacctaggaatccaacttacaagggatgtgaargacctcttcaaggagaactacaaaccactgctcaaggaaataaaagaggataaaaacaaatggaagaacattccatgctcatgggtaggaagaatcaatatcgtgaaaatggccatactgcccmaggtaatttacagattcaatgccatccccatcaagctascaatgcctttcttcacagaattggaaaaaactactttaaagttcatatggaaccaaaaaagagcccgcatcgccaagtcaatcctaagccaaaagaacaaaggctggaggcatcacactacctgacttcaaactatactacaaggctagagtaaccaaaacagcatggtactggtaccaaaacagagatatacaagaatggaacagaacagagccctcagaaataacgctgcatatctacaactatctgatctttgacaaacctgagaaaaacaagcaatggggaaaggattccctatttaataaatggtgctgggaaaactggctagccatatgtagaaagctgaaactggawcccttccttacaccttatacaaaaatcaattcaagatggattaaagacttaaacrttagacctaaaaccataaaaaccctagaagaaaacctaggcattaccattcaggacataggcatgggcaaggacttcatgtctaaaacaccaaaagcaatggcaacaaaagacaaaattgacaaatgggatctaattaaactaaagagcttctgcacagcaaaagaaactaccatcagagtgaacaggcaacctacaaaatgggagaaaattttcacaacctactcatctgacaaagggctaatatccagaatctacaatgaactcatacaaatttacaagaaaaaaacaaacaaccccatcaaaaagtgggcraaggacatgaacagacacttttcaaaagaagacatttatgcagccaaaaaacacatgaaaaaatgctcatcatcactggccatcagagaaatgcaaatcaaaaccacaatgagacaccatctcacaccatttagaatggcaatcattaaaaagtcaggaaaccacaggtactggaaaggatgtggagaaataggaacacttttacactgttggtgggactgtaaactagttcaaccattgtggaagtcagtgtggcgattcctcagggatctagaactggaaataccatttgacccagccatcccattactgggtatatacccaaaggactataaatcatgctgctataaagacacatgcacacgtatgtttattgcggcattattcacaatagcaaagacttggaaccaacccaaatgtccaacaatgatagactggattaagaaaatgtggcacatatacaccatggaatactatgcagccataaaaaatgatgagttcatgtcctttgtagggacatggatgaaattggaaaacatcattctcagtaaactattgcaagaacaaaaaaccaaagaccgcatattctcactcataggtgggaattgaacaatgagaacacatggacacaggaaggggaatatcacactggggactgttgtggggtggggggaggggggagggatagcattgggagatatacctaatgctagatgacgagttagtgggtgcagtgcaccagcatggcacatgtatacatatgtaactaacctgcacaatgtgcacatgtaccctaaaacttaaagtataataaaaataaaaataaaaaaaataaaaataaaaataaagattgcactgaatccatacattgcttgggtagaatggtcattttaacaatattaatacttcagatccatgatcatgggatgtctttgcattcrtgtgtgttgtcttcaacgtgtttcatcagatttttgtagttttccatgtagaggtctttatccatcttggttaaatttatttctaattttttatagctattgtaaaagggattgccttcttaatttctttgtcagctagttcatcattggtatatagaaatactactgatttttttgtatattgatttttgtatcctgcaactttactcaatttatttatcagatctaagagttttttgatggagtctatgtttttctagatataggattatgtcatctacaaagagggacaatttgacttcctcttttccagtttggatgcctgattgttctgagtaggacttctagtacaattttgaatagcagcagtgatagtgagcaccttgtccttttctagttcttagaggaaaggctttcaactttccacattcaatatgatattagctgtggttttattatgtgtggtgtttattatgttgaggcatgttccttcctagtatttttagtttttatyatgaagtgatgttgaattttatcaaatgctttttctgcatatattgagaggatagatgcaaaaaagcatttttatgcgaagtcacccagtactgaactttttattgttgggagtctttattgctgatttaatctgattacttattattggtctrtttaggttttctatttcttcctgattcaatcttggtatatgtgtccaggaatttatccatttcatctaggttttctagtttgctaatacatacttgttcaaaatagtctctgatacttttgtatttctgtgctatcagttataatgtctcctttttcatttctgattttatttttggaggtcttctcatttttctyggttagtctagctagtggcttattcattttgtttatcttttcaaaaaaccaacttttgtttccttgacacattgtactttttaaatttttattttatttagttctcttatctttattatttcttttattctactactttgtggcctagttagttattgcttctcaagttccttgaggtgcattattaggttgcttatttgaaacatttttagttttttgttgttgatatttattgtgttaaacttccttttgactactactttgtgttgtttccattttcatttgtttcaagaaatttattgatttattccttaattatctctttgacccaaaggtcattcagagacwttttttttaattttcatgtatttatacagtttccaaagtttcttttgttattgatttctagttttattcattgtggtctgagaagaaacttgatataatttagatttttaaaaaatgttttgagacttattttgtatcctagcatctggtctatcctggagaatagttccatgtgctgacaatgagtactctgcagctgttcaacaaaatgttctgtaaatatctgtgaagtccattggyctaaaatgcagtttaaatccaacgtttatttattaattttctgtctagatgagctgtctggttctgagagtgggatgttgaattcctcaactatttttgtgttgaagtgtctctctccctttagatctattaatrtttgctttgcatatatctgggtgtgatactgcttctcagccttttggctaagatcaggtttagtatctggttgctctggtattggtgcatatatgtttagaactattctatcctcttactgaattgatctcgttgtcattatataatgactgtgtcttctttttactgttttgacttaatttctgtttcatctaatataagtatagctactcttgcttttttgcttttgtttgcatgaagtatatttttctgtctttcacttctagtctatatctgtcttttctatcttttacttctagtctgtatctgtgtacaggtgagatgagcttcttagcacataattaagtcatgttctttaatcaattcacccattctatgtcttgtgaatggaaatcttagtctgtttacacccaaggtgattatcgatatctgagtcttcattcctgtcattttgttaattgatttataattgttatgtatatcttttgttcctttctctctctctctctctgtcttattgtttatcattgcagttgggtggttttctgtagtgctaacatttgattcctttcatttccttatttgtgtttgctctaccagtgggttttatactttcaagtgttttcataatgatagatatcatccttttgctttcacatgtcagcctccctgaggtatttcttgtagtgctggtctagtggtgatgaattctctgagctttgcttctgtgagaaaagactttatttttccttcatttataaaggacaacttggctgggtatatggttttttctttcagtgacttgaatatattatcccattatctcctggactgaatgatttctgctgagaaatctgttagtctgattggagtttccttataagttactagatactttycttttgctgtttttagaactctctatgtctttgacttttttttttttttttttgagatggagtctcgctctgtcccccatgctggagtgcagtggcgtgatctcagctcactgcaagctccgcctcctgggttcacaccattctcctgcctcagcctcccgagtagctgggactacaggcacrcgccaccatgcctggctaattttttgtatttttagtagagatggagtttcaccgtgttaggcaggattgtctcgatctcctgacctcgtgatctgcctgtcttggcctccgaaagtgctgggattacaggcgtgagccaccgcacccagccatctttgacttttgaaagtttggctacaatgcaccayggggaggaccttgaattttatttgtgtgagtttctctgagcttcctgcatctagatgtctaaatctctttttgttagacttgggaagttttcacctataattttgttaaacaggttttctgtcccttttattttcttttcaccttctgggacactgaaaattcaaatatgtcatgcaagctttgttcattattattattttttatgtttttagtgttcatctgactgggttatgtcaaaagacctgtcttcaaattctgattctttcttcaacttgatatagtctattgttaaaacttttgaatgtattttgtatttctttcaatgaattcttcattccagagtttgtctttggttctttgtttttatacctgtctctttagtaaatttctcattcatattatgaattgtttttctgagttgtagtctatctcactgagataggctttaatattgttattttgaattatctgggatttcaaaaaattcttattcattggaatctgttgctggaggattattttgttcatttggaggtgtcatattttcttgctttttcacatctcttgtgtctttgcagtggtatctgtgtatctggtgtagcagttgcttgttctaatttttttttcttttctttttatttgagacagagtctcgctctgtcacccaggctggagtgcagtggcaccatcttggcttactgcaacctccgcctcccgggttcaagcaattctcctgcctcagccttccaagtagctgggattacaggtgcccgccaccatgcctggctaattttttgtatttttagtagagacggggttttaccatgttagccaggatggtctcaatctccagacctcgtgatctgcctgtctcagccttccaaagtgctgagattacagccgatttattaaattatcttttgtcagggaaactttttcttgaaggtgtatctatgctgccagttgggtaaagttccttggcttttgattttgggtgcaggcagtagcatagtctctatgatttatttgactgtaaacagtatcagtagtatctatgattccttcagtggcttagagtgtggttattagtggaagcctgttgtaaaattttgctggggacagggatgtgatgtgaatcagtctttagaccccagtggtggcagcagtgggccacatgtgcctctcctaagctgctcaggacttggtggatatgtgggtcctggtgtgagctccctctctgaagcaatgccatcacatgatttccaggcagctctctgtatcagtttcagagaccacatgggttgacagacttccccaaggctaggactgcaggagtacatggtgggaatgtggatggctggattcattcacttaatctttcctcatattttagggagcctctctaggctcatagatgatgctagctgagcaggctgccttacttctctcttcttccttaccttaggcatttcctgtaatttctctgttgaattcaaaattatattttagatgataagtctgattacctactcactccattggttcttctctgtggagcaggcaagtaccagatgcctctagcctaccgtcttgaagacaccctccaagacaagtttcttaaaggaggtatgctaaggtagaaccttttttttgttagaagttataaaattccaatggaatgagtatatacaaaaagagaacattattggttcatgtaaacatgatgttggctattatcagtgcttacttgttcctgcgtttgtctctgcctcacctgcctaacagcttgttctttcagccttgctttcttcatgaagctggaactgtagccagctctaagttcacttcatgccagatgcataagcaaaggagaaaggatctccaattacacctcgcaaaccgacattcattctgtgcaaatgagaaatatctcaggggaggactcaggcccgacttgggccacacacacacccattggccagtcactgtgaaacaattttgtagacyggttgtgagggcagaagtagaatttaacaaccttttctggaaccacataattgaaggaagggggaaaagttccccctaaatgattttggacgcacagttaccagaagaagagataaagataaggagaagaaaaaggaaaaaataaaaacagaaacagtatatactctaggaggtacatatggagtatcatgggaatttagaagaaagagattatttcttagaagaattcagtgaaatctgatggagtctttaaaaaatgaaggaatatatactctcaagtggttgcaaagaacatttcaggatagacaataccagcttgaaaatatgagttcagtgtagatgttttaaaaataagaaaagcagagtagttaagtgtagttaactacactttgaaattaatttttagtttattttatttttttgagatggaatctcgctctgttgcccaggctggagtgcagtggctctatctcagctcactgcaagctccgcctcctgggttcacaccattctcctgcctcaacctcctgagtagctgggactactggcgcctgccaccacgcctggttaattttttgtatttttagtagagacagggtttcaccgtgttagccaggatggtctcaatctcctgagctcgtgattcgcccgccttggcctcccaaagtgctgggattcacagacgtgagccactgcacccagcctgaaattaattttttagtccacatgaagcagatgaggaacatcaaaaccatctttaaatatatcagtcttgtagatgtttgtgaattaaattgattgacagagacagactaacaagaagttatttcagtgatctatgtggaaagtcttgagagcctgaatgtaatgagaataataccaagatataagcagaatcttgcactgaacattgccaaatattaaatactgtccctagttatttgtcagtgatattttaatgattattgccatcttcctcttttttccccattctccaaaactgcattattataatatacagtattataatatatatattatatatataataatatatatataatataatataatataataaggttatggattaactcctcttaattatctgaaaagagataacgttcatgtgctcagcacacaactaagtagtctgatttggtgttttttattttatttattttagaaaagaagactttcaaaaggagaaaaatctactgccaaataactcagcacctcttacagaaccacaagatgtggaagaaagtcattgaagaggagcaacggttggcaggcatagaaaatcaatccctggaccagacccctcagtcgcactcttcagaacagatccaggctatcaaggaagaagaagaagagaaagggaaaccaagaggcgaggagataccaacccaaaagccagaccagtgacaatggatagaatgggctgtgtttccaaacagattgacttgtcaaagactctcttcaagccagcayaacatttagacacaacactgtagaaatttgagatgggcaaatggctattgcattttgggattcttcgcattttgtgtgtatatttttacagtgaggtacattgttaaaaactttttgctcaaagaagctttcacattgcaacaccagcttctaaggattttttaaggagggaatatatatgtgtgtgtgtatataagctcccacatagatacatgtaaaacatattcacacccatgcacgcacacacatacacactgaaggccacgattgctggctccacaatttagtaacatttatattaagatatatatatagtggtcactgtgatataataaatcataaaggaaaccaaatcacaaaggagatggtgtggcttagcaaggaaacagtgcaggaaatgtaggttaccaactaagcagcttttgctcttagtactgagggatgaaagttccagagcattatttgaattctgatacatcctgccaacactgtgtgtgtgtgtgtgtgtgtgtgtgtgtgtgtgtgtgtgtgtgaaagagagacagaagggaatggtttgagaggktgcttgtgtgcatgtgtgtgcatatgtaaagagatttttgtggtttaagtaactcagaatagctgtagcaaatgactgaatacatgtgaacaaacagaaggaagttcactctggagtgtctttgggaggcagccattccaaatgccctcctccatttagcttcaataaagggccttttgctgrtggagggcactcaagggctgggtgagagggccacgtgtttggtattacattactgctatgcaccacttgaaggagctctatcaccagcctcaaacccgaaagactgaggcattttccagtctacttgcctaatgaatgtatargaactgtctatgagtatggatgtcactcaactaagatcaaatcaccatttaaggggatggcattctttatacctaaacacctaagagctgaagtcaggtcttttaatcaggttagaattctaaatgatgccagagaaggcttgggaaattgtacttcagcgtgatagcctgtgtcttcttaatttgctgcaaaatatgtggtagagaaagaaaaggaaacagaaaaatcactctgggttatatagcaagagatgaaggagaatatttcaacacagggtttttgtgttgacataggaaaagcctgattcttggcaactgttgtagtttgtctttcaggggtgaaggtcccactgacaacccctgttgtggtgttccacacgctgtttgttggggtagcttccatcggcagtctggcccattgtcagtcatgcttcttctggccggggagattatagagagattgtttgaagatysggttattattgaaagtctttttttttgtttgttttgttttggtttgtttgtttatctacacttgtttatgctgtgagccaaacctctatttaaaaagttgatactcactttcaatattttatttcatattattatatatgtcatgatagttatcttgatgtaaatatgaagatttttttgtttctgtagatagtaaactctttttttaaaaaaggaaaagggaaacatttttataaagttatattttaatcaccatttttatacattgtagttctctccaagcccagtaagagaatgatgattcatttgcatggaggtcgatggacaaccaatcatctaccttttctaatttaaatgataatctgatatagttttattgccagttaaatgaggatgctgcaaagcatgttttttcactagtaacttttgctaactgaatgaattctgggtccatatctcccagatgaaaaactgttaaccaataccatattttatagttggtgtccatttctttccaacactgtttgttatgattcttccttsagtacttatatacagacctgctcattatctaaacaatcttaccttctaagtaaaccttgattgtgatttccagtttttattttctctgacgtagtagaaaggaatgtttacattaaaaatacttttgtttctcataaatggatattgtactcccccctttcaaagcattattttacaataattcatggcattttaaaaaataaggcaaagataatacgacaaaaaatatacatggtttcaaggcaaattctccaataagttggaaaatgtaaaaaggatcaagtggatgcagcctctacctaaataattaaaatatatttcagtatatttctgaattaacaccaggtcttcattatttagaacttactaaattgttttcattttcttagttttacctgtgtatctccatgtttgcaaaaattactataagtcaaattttgccagtgaatttaactatttttctttccttgcaattaaggggaaaaaagcatttatcttatcttctcataccccttgcatctaagtacttagcaaagtcaatattttcccattttccaaatgcgtccatctctaacataaatattaattgaacatagagctatgtttggagtgagtggactggcaggacagttggaagtccatcacagtctattgacagtttcatcaaagctgtatagtccaactagtggggcagcttggctactatggtggaagtctcagcaaactgcctggttttgtttgtttgttttgttttaaggtacaggaaataagaggaataatagtggccaaagcaattagaacatcttcattccagaactgtgttcagcaatccaggcagattgatacatttttctttaaaaataaattgctattacagctagacgtcaattgggataaataaagggatgaagatccactaagtttgtgactttcatacacacccagtacatctcaaaggatgctaagggacattttctgccagtagagttctccccctttttggtgacagcaatattattatgttcacatctaactccagagcttacttcctgtggtgccaatgtatttgttgcaatttactacatttttatatgagcctatttataggtgccattaaactcaggtctttcaaatgaaagagtttctagcccacttagggaaaaagataattgtttagaaaaccataaaatcaatggtaggaaaagttggaactggttacctggatgccatggttctctgttaaataaagtaagagaccaggtgtattctgagtgtcatcagtgttattttcagcatgctaataaatgtctttccggttatatatctatctaaattaacctttaaaatattggtttccttgataaaagcaccacttttgcttttgttagctgtaatattttttgtcatttagataagacctggtttggctctcaataaaagatgaagacagtagctctgtacagggatatatctatattagtcttcatctgatgaatgaagaaattttctcatattatgttcaagaaagtatttacttcctaaaaatagaattcccgattctgtctattttggttgaataccagaacaaatctttccgttgcaatcccagtaaaacgaaagaaaaggaatatcttacagactgttcatattagatgtatgtagactgttaatttgcaatttccccatatttcctgcctatcttacccagataactttctttgaaggtaaaagctgtgcaaaaggcatgagactcaggcctactctttgtttaaatgatggaaaaatataaattattttctaagtaataaaagtataaaaattatcattataaataaagtctaaagtttgaaattattaatttataaaagtgaactaattgtgtgattatcaaatcctgattaatgagaagtgaataatctaaaaatcatttatattctactgtgggaggtattcttggtgcttccatgtcagtatcgggctctccattgtcctcatcatttatagtacttctaaaataataatggaaacctcaataagggtcttgtcctcttctgtcatcctaaccctgattctagtttaatgcctttcctgacttatatgccatttgtaaataaacttcctttcaaactgttagaacgctccaataaaacaaagttctatgaactttcatagtctagaaaaaccaacaagatcccccttatttagagattattagctaatgtgtgaaagaaatatcaatagaagttcaaatgctaatagctcaattccagataattgaaagctaaaatatctatgtactttgaagccaaactgagtttatttcattgatcgaacaagcagcaacacattttatgaccattgtcctaggtcgtttgtgtctttatgaatttgctgatattgtcagtccattttttaaatcttcaacaaaattcaattttaagattaagaaatcagcaattttaggtaaagaatattccaagattaaattgttctttttaagaaatatatcagttttaggtcctatgttcacacatcaatttgttcatctggaagatattcaaattcttattgggaatgaattacactacaaacaatgagttgagctaaaaactatacataacttaaattgagatttgcatacgtatttgtgtgtttcacaccaaagacccatgctcagagaatggtaacatattttccagtctatgttatgcaccatggatgttaggcaatgtgtgctattgccaacacatggtatttgttgaaatacatgttgctttgaccttacctaatggtgcttttacctaacttgaagtgctttttgtgttcccaccagcaaatcattctaacagcaggctaacaatggtgaagtaaaatgaacatttttgggccgggcgcagtggctcacgcctgtaatcccagcactttgggaggccaaggctggtggatcacctgaggtcgggagttcgacaccagcctgaccaacacggagaaaccccgtctttactaaaaatacaaaatgattcaggtgtggtggcgcatgtctgtaatcccagctacccaggaggctgaggcagaatcgcttgaacctgggaggcagaggttatggtgagctgagattgcaccattgcactccagcctgggcaacaggagttaaattttgcctcaaaaaaaaaaaaaaaaaaaaaaagaacattttttggcaaaatatgaagacacgaaactgaagataaaggcttcatttccatagtggaaatcagtgtttacctgctgattcaaaaatactgacctagtatcagtgtaggtaagaccataaaatacagtgtatagaattatatataaatggaaaacaaaattagcttttgacatatgtttaagtctctaaaaggaatccacattttctttccagatacagctagtttttctccacatgtttttaaggttgatttccttgacacacattggtatccttgggtttctgcttccttgaaaagttgtggagcacagaagaaaagccttctctttacagataaaaaatgttgaacatgttcatgttctgacaatgaagcaatgatttcctcattgctttgcattaagaagtggttctttagttatgcaaataattcaataaccaaaaatgcttcaaagagtaataataaatcaccataggtaagtattctcaagaatgtttaaatttggtttattttcttgaagcaaagttatttaattttttaatttttaacttaaaatgaaacccacaaaatgacattcygtggtactgagtattttcacataatcagaactgtaaactactgattattttcatatactcagaggctgaatattttgatataataagaactagtatcatataacagaaaactagaaagaaggtttaattctttttctaatattctacaagcctcatggggaaaatgttttatgaaggattcaaatacattagataaaaattagtgtcaataatttaactttgtacaaattatagtctgagatcttctgagttttcctaagacaaaggagtgtattatccagcaatttattgttttgtgttgttataaaataaatgttctattaatgtatattttattttactaagttctaacacaaaaggccaaatacttatctttcctactaagaaaaattaaaccttactaatcttgactttcacagatgaaacactgaccagtcaataaacaacagccactgcattaatctgcccagcatgatcagatagtaggttagaatttgaaattcattaataaaaaattaataacaaaactttgtaagccttaatggtttaatatttccgtgtcattgaaagttcctatttcaaattaaacaaactacagcaggatatttttcctttcctgtttcaaaacaaaaaccagatgaagaaaaaacaaagacaaactcataggaggaaagcatggcttctcttcaattatacttctcttactcaatattagtaaccaaaaaataagcagaaattctcctctgccataattaaaagaaagaatggccttcgacttaagttctagttcctcaagcctgctttccttgtaaagtccatggtactaagaagcaaaaaatgcagagctgtggattgggagtgaacactacataaaatttgcagggtatcccaggacacccctcagtctttaatacaaaccaatttagttactctggagtgaaatgacttgtggatacactgttcaaccatgacttcctttatgacaaggagcacttatacatgtttccaaatgtgaattagcccttgaattagtttgaaaactgctacttgaataacttttgaagagaaagattttctttccggtaattttactccctaaaaaaggcaaaatactcagatgttcaatgtgaaattacaaatagttgtttgaagtatatatacttcaataaatagttctttgtgtatataaagtgttggttcatagcagtttccttgtcccttttctttttaaaattcccaactgattatgggtcaaaaactccatcttatatcagcgatgatttcattttaactatttataaggataatttagtattatagtattgctaactttaataattctaccatatctatatattacctgttagtgaggttttaatggctttacttaatacatatttgttcatcagcttaaaaaatcactaaattttttatactctgtaaaatatttgcatgggaattttagcttattatgtttgcttaactggtgtttttttcacttatgactgtcagtttatgtcttaatgtattctcacagaagaatgcataccatttttgttccaacaagaacaatctgttagttgataagcactggtaataaatatcactgaacccacccaccccctgatatttcttcctcaagttttctatcatgcaaatcacaaaatgaaaattggtgcttttacaaatatttgaaagctctcaatgcaaaataataaaaatgagattctccctggctttctataatatattaggatatgtgactgaaggaaatttaatctgaatttagagtgttttaggttttggttggtttgaataatttgatttgcattttggtattaaaatgtgctctgatttctgcgggcatttgttctgaccagtcattacctcttcccaacagaaaaaaaaaaaaaaaaaaaaaaactggcattggcaagttttaattaatatggcccaaaaatttgaccttgaaggatatttgtaaaccagagagtatttaattaactaaatttactgtttctgaaaagcaatattttcaaataactgccaaccaaagtgacactatagggatgtcatttgtacatgacaatttttaacaatgtaattcttaccactctcgacagacctgaatatgtttactaataactttgccaaatttttcaacttctagaaaaacaagagtgagtcttttgaacttcatcattttgcaattgaaataaatcttgtcctttcacctatatcttccatttaatatatgtagcaatacttagtatcatcccatcacaagtattgttaggcgacttagtggcggagaaatgtttgtaaaaagtagaatctgtacagaaaaaaaactagatcaattgtatttatttttattattttttagcttagatactatgttga

SEQ ID NO: 95089 - DNA, 44128 bp, Homo sapiens
  misc_feature (1)...(44128): n = A,T,C or G
ataattgtggtatataatccactcatatctctcgtgtcaatactaaaagaaaaatctatcaaaaataaaaactacagcaacctgtcaaaaggtaggcaaaacaaaaagatgtaaattgagaaaacaaaaacgaaaatgtgggaagatggagttaaagtgttaaagatggagtgttttagttgccctttgtttcttttctttgtgatcatagttagattgtcatctgtttgaaataacttgttatatctacaggatgtgttttgtaagcctcatagtaaccacaagcaaaaatctataataggtacactaaaaataaaaggcaacaaattaaaacatacttccagagaaaatgatttaaccccaaagtacgacagtaggaaagaaagagaggagtcacaaaacagaaaataagtaacaaaatggcagtattacgttcttacctattaataataaaattcaatgtaaattaactgaattctccaattaaaagacatggaagccagatgctgtgatatgtacctgtaaccccagctacttagaaggctgaggtaggaagattgcttgagcccaggagttcaagaccagcctgggcaacacagtgagaccctgcctctaaaacaattttttaaatttaaatttaaaaagacatagagaggggccaggcacagtggctcacacctgtaatcccagcactttggatggccgaggcaggtggatcatctgaggtcaggagttcaagactaacctggccaacatggtgaaaccctgtctctactaaaaacacaaaaattagccgggcatggtggcacatgcctgtaatcccagacacttgggaggctgaggcaggagaatcacttgaacccgggaggtggaggttgcagtgagccaagatcgtgccactgcactccagcctgggcaacaagaataaaactccatctcaaataaataaataaatataaaaagacatagagtggctaaatggattaagaaaacaagacccaactactatatactgcctacaagaaattcacttcaccattaaagacacatgtagcctgaaagtgaaggaatggaaaaagatatgccacacaaaggaaaaacaaaaaagagcaggagtcgctatacttgcagcagataaaatggatttcaaatcaaagaatgtaaaaagagacaaggaaggtcactagagggccaggtgtagtggctcacacctctatcccagctctttgggagtctgaggtggacaaatcacttgaggccaggagttcaagaccagcctggccaacatatcaaaaccccatctttactaaaaatacaaaagataactgggcatggtggcgggtacctgtaatcccagctactcaggaggctgaggcacaaaaatcacttgagcctgggaggcagaattttcagcaagccgagatctcaccactgcactccaacctaggcagcagagtgagaccctgtcacacacacacgcacacatgcacacaaagatacacacagactgagagtaaaggggtggaaaaagacattccatgctaatggcaaccaaaagagtgcaggaaaagtaatacttgtatcagataaaatagactttaagtcaaaaactgtaaaaagagacaaagaaggtcattataaaatgatagagaagtcaattcatcaagaggatataacaatcatatatgcacccaacatcagaatacacacacacacacacacacacacacacacacacacacacacacacaggcttaggagtccagctgcatgactcctaaaccataatttctaatcttgtagctaatttgttagtcctgcaaaggcagtctagtcctcatgcaagaaaggagtttattttgggaaagggctgttactttctttgttcaaagttaaactataaattcagttcctcccaaaatcagtttggcctatgcccaggaatgaacaaggacagtttggaggttagaagcaagatggagtcagttaggtcagatttctttgattgtcatcattttctcagttacaatgtttgcaaaggtggtttcaataacataatacaatatgtacaacatggtgactgtaattaacagcaatgtattatatacttgaaaattgctaagagagtagattttaagtgttcttaccacaaaaaattagtatgtgaggtaatgaatgtgtaaattagcttgatttagcaattccacaatgcatatacatatttcaaaacacctgattgtccatgataaagatatactatctttatttttcaatgataaataagttaaatatttttaaagtataaaaataggaagaatacaaaatagcattttaatactacctatgaggaatcaaatttctgattatcagcaaaacaatatcactgacaagtggatgcattttaataaaccaaaaaaactttatatacatagggtatggtaaactaaatatttaaaaaaaaccaagaacttaatttcaatccaatcacaagaaaacagcagacaaattcaaactgaaagacatttacaaaacacctgaccagtactcttcaaagtatcatggtcataaaagacaaagaaagaccgaggaactatactgtttcatgtagacaggacaactaactacatgcaacgtgagatcctgaattcaatcctaaaccaggaaaagaacattagtgggaaaactagcaaaactcaatatgcagaaaaatgttaactcagcaatatttcaaaccctgcatagtccaaagaaaggactggcacctgacagctcctgggaggtaacctctatgcccttggaatatcctgcctgaaaacagtatctttgtatacttggggccttgggccatgccaggcagtttatactaataatgtgattccgagtgggtccttaggccacactctatcagtttcacatctggagtcgatggagactgagtagctaaggtcagccacacaagcatcccatggctctgtgatgactgcaataactctggacaccaaggtgttgccagatggtgccatgcagttccaggctcttggtgtcccaaacgaaaagctggactgggccgggtgctgtggctcatgcctataatcccagcactttgggaggctgaggcgtgcggatcatttgaggtcagaagttcaagaccagcctgaccaacatggtgaaaccctgtctctactaaaaatacaaaaattagccgggcatggtggcacatgcctgtaatcccagctactcaggaggctgggggaagagaattgcttgaacccaggaggcagaggttgcagtgagccactgcattccagcctgggcaatagagcaaggctctgtctcaaaaacaaaaaaacaaaaaaaccaaaaaactggacgtgatacacacaagtagcaaagccagcagcaatagtttattaagcacagcattatactctcaaagagggcagagtgggctgacctctgcgagatgagatcagcatcagtttcctgggcttgtggtcttcttatgtgttcttttttccctttcttttcccaaggctgccgagtctctagctagtgtctgccttttgattgataggcgtgttgcttactttgtttggcccttgtgcgcttgcacgtcgcctccgttccataatctcaagtacatgcatgatatgcagtccatatgcatgagctttaatgagctgattatcatacggggtcatgttaaagatgctttttcgctctaatgagcatgcctatctcggaggagctgccccttactggtttggtcaggatcttgccagccatggggtctctttactcagttttttatcttacttttgttttggctgcttaacttctgcttcttctcttgcttcttgctcactcaccccttcaccttgcttctgctttcgctcattccaccctttatccaacctccaattccttctgctgttctcctgcctcaaaagtgtgcttccctggttgtcaatacttcgtgcatattgtaaacatcgttgttgggagaattaaatgctgtccatacaacaccactgggagaggacacctagaagctcagtctattctctcctagacttcgtgctatgtaccttttccttctactgattttaatctgtaatcttttgctgtaataaactgtaaccatgagtattacagtttcttcttgtttgttctagaggcaaagtctcactctgtcacccaggctagagtatagtggttccattatagctcactgcagcttcgaacttctgggcccaagcaatccttccactgcatcctcccaaggagctagcactacaggcacacaccaccacactgggctaatttttacatcttttttggtagagacagggtcttgctatgttgtccaggctggtctcaaactcctggcctcaagtgatcctcaagcctcaacctcccaaagcaatggaattataggcgtgagccatcacgcctggctcagtataacagtttctaagttctatgagtcttcctagcaaatcactggacctgaggttgatcttggagaacctctgacacactcaaataagttctgaagattagctgacaatattgcagcagtgttaatggcttggtttcataattgtaccttagaagaagctgagtgaaggatatacaagaactttttgcagctttctgaaattctaaagttatttcaaaataaaaagttaaacacaaagaacaaggagacaagtgtgatcattgttagtgctgggtgttaggtacatgcaggttcattatatttttctctccacttttgtacaagtttgaaatattttgtaatttaaaaagcctttttaagctagagaattcaagatttcagtgcaacaaatcaaaatgatcacatccaaaacatacagaacagggtcagcttcaaagcggatgagaaaacaatttaaacatggagagtttattaaaaagccttgctccaagggcccctgagcaaggctttcttcactgggcacttcctgcaatccaagcctttctctatggcagagaggaactaagtcattgcccatggtcagtgatagcataaatccttggcggagatgagtccaggtgtaagtaagaactttcacctccaaacagtggggccaagaccaccttccctgaaaccactgcccacagcaatgaggactgccaggagtctgagccccacagctccagaaggacctactaggtgataagttgcaaagcttgggccacaggtcctgcctcttcctacagacacaagctagacactaccttggggatatgatggggtgctgtgaggctccttactgagcaaataccttgcattacaggggaggccaaggcccagaaaggagtacacctgctcagagtcaacatagctcagaagtcctgccagaacaggagccttgatctcctactggccccttgatttctttcccagtcttacacaaatgtgttacgtaatctacttattgtgcaaacccaaacaaagtgacatccctccctgagcctgtttccttacctgcaaaatggggagccgcatctgactttccaaggtggttatgcagggagggaacctctaagcctctcattcctctcactaagacccagctctcatctggatcccacacactacagatggatgctccacaaatatttttccagggaatgtcaggggatgctaagcataagacaagccatattttagagcagaaacatggggagagaggaaaaacgtacaccttacagagcaatcctttcacatgaggaccatctgaggggagcctattaagctcgtgtgatattaacagcttgagtgcctgaagggcacacagtgaaagatcagggaagaccaggatatcactttggaaacactgctggggtacacagctttttggtacaagtagtgtcaaaggaatccctggctttgagatgtaagggctccaacctcccagaagtcctcccagggcagccccagcgacaggcacaaaggtcacacccatgcaggaagagagggaggaaggagaggagctccataagcccagacaagggcttgagagcagacaagggcttgagagcagacaagggcttgagagcagacaagggcttgagagctggccaagcagtttctctcagcttctgtgttccagcccctctgtgggaggagagaagggcaggaccacaagcctgccagaggctgcggcctacagccggggagaggccagcccggcctacagtgcggacacaggacagaggggagccaggtgagccaggtttttgggcagggagggactgggagaccccagaggagagggctgcccccatgatgaccctgtccgcagctccgagagaccctgagcaaggctttcttcactgggcacctcctgcaaatcaggccctgcactaagtgttagggtcacggcatgacagtgacaaagatcccggccctcttgcagtttctgtgttagtagcagggagatggaagtaaacaaaaacatatgaaatgagtaaatgatctcaaatgtcagaaggggataagtgaaaagagaaaaaggagagcagagtgaggaggacagggaatgccgggggagggggcttggggttttaaagagggtggcctctttaaggttaaatgaggttcaatgcaaaaagccctagtgacatttgaagaaagggtgttctgggcagatggagatgccctagcaaawgctggcagtggcagggaggcctggagcattcagaacagcaaggaggcagtggcagcagagcaaggaaaagaggtaaggcaggacgagaggagccgcactaggggcacttgcaggactccggggggcagaggatggggccccttgccagcacccccacagccctgctgggggtattggtttgaaagcctcatatgaatcatttgctacatgtggttgcatgacccttataaagtctcctccctttccaaggcccacatcctctccataaaatggtaataacagcagtgcatctgtcaggttgaggtcaggaaggaaggggatcaaaagcatggcagcctgccggagagatttacaacatacctgctgcaagctaggaaaygcagagctggcctcccaggccttgtgggaggaacatgtaagcaaataagaacttgtccctaaccctagagcacccagggaacgagggagctgaactttgttcagagagaacagcaggggcaaagggtaggaagagaatgagtggaggccagggatgagggcagtaagttgacataggagagaggtgagtggagtagggttgggtagacacagcaaggactccattccacaaacagtgggccccaaggagcagattccaagcaggagaggaaaacaatgtgatttgcagttcaagagttcacctggcagctgggagaacaaataagaggaacactgaggccaagtaagagataacagtggcctggatgctagccaaagagatagcaaggagcagatggactcaagagacttgtgaaataggatggactgcacctcatggttgcctcactgtggaggaataggggcttctcagaggccaagcacttgccatgaaggagacagggtccaacctgggtatgaaagacactcaggggctccaggggaacacttcacaggcaggaagaaggcttcctcccttcagttccacaatatacctgcagggctcatagaaatggagctgagtgatcctagaacttatgagcagtttaatgagaccaaggtgcccccagcaatcctccacagtggagctgtagtatggacaagtcatgtgctttgtggtcagaccccatccaactcctggccatctccagctgtgtggctaggggccactcaacctctccaggattattttcttcaggtgtaagcttcactgacttttttgtgaagatttccctaggcaattcatgtaactcaaactgcagtggatagagcccartctttggggtcaggccctgtccaatnttggctaacaagtattgaacaaacatgtaccaagcaatggctgcataccatgcctaccatgcacacagtgcctggtccacagccagtgtccacagggggagtggggaggtggagtggcattcaggtacttagggatgtctttcttctaccaaccagccctggctgacacccagccctaggcagttcctcttgcacacaggttctttgcactgaccaatgctgagagcagaccctcggagcagccgggttggaagtgtctctccayagtcaccagacagatccaggataggatgggcagcccagtgcaccgagtgtcattgggggatacctggagcaggcaaatgcaccccgacatagagagcgagaggtatatgcagtcctttgacgtggaacggctcaccaacatccttgatggaggtgcccagaacactgcactccgcaggaaagttggtaaggggaagctggggaatgggacatctgttttatgccccatgcttctcttgtaagaagagtccttcattagyagttctgcttccaaataacaaactttgcccttgaaattccactgttagagattcattccttygaactgtaaagacaatcttcacatgtcaatattgcctgagcccacctaggggatagaagagtcctaggcagcagaagacctggattctggtcctaaaattctgccactgcatagctttgtaaccttgggcaattcactttcccaccttggtcctcagttttgtcatctgtaaaataacaataatgtctgacttcctttccagatccatgaagcaagtgggtgagaagatttsaaggtgccagaaacctcacccaggtccctaagccctctgttctctgtcctctgcagagagcatcatccacagttaccyggagtttagctgtaaggacaattatttcatgacccagaatgagcgttataaggctgccatgcggagggcattccacatccggttgatagctcggcgcctgggttggttagaagatggtcgtgaattaggctacgcttacaggtgctcactcctcgagcagccccactagagagggatctacctgggatcacctggaaaccccctagccccatgagccatttcccccaacaaagggaagacttgttgggaaaccaggatgctaggtgccctttatctcctgtactctgctcaggcagggggtacctgggcccctgtctccaataagctactcaactacagcmtctctccccaacagagccctttctrgagacgtggccttaaatatacacagagtcttcgtgagagccctcaggagcctgggctcagaggagcagattgccaaatgggacccactctgcaaaaacatccagatcatcgcaacgtatgcacagacagagttgggacatggtgagctaggactgctgygtgtggtgtttaggttgtgcactgcaaaactccagagggcccatttacatctaggtagtcataggttcatatgctccgagggacatatgtttaataagaaaacattccagcagctggcagtcaagggtcctgaggaaggggtgccaccttctaatttgcacgtattgtatgagctcccagtggggcaagtcattccttctggaaacatcagcagccaccccttctcatggactggctataggggactgtgtgtcccacacacagcccacagatgaaaggggagaactgcctgcaagtacagctgggagctgggccccactccatactgcgctgatgcctaagagttcagacccacctagaagcagcttcacaggtaagaaccccacctcaggccaatgtctaacacctctccttgatcctaagggacatatcttcagggcctggagactgaagccacctatgacgcagccacccaggagtttgtgatacacagccccacgctgactgccaccaaatggtggcctggagactgtgagtatacatccaccccccttccttaactctccccaagtagaagaatgttggagggcagagtagcactggctttgaggtccaacagacctcagattgattttctgttctaggctgctgaccttgggcaagtcagttcaccaacctgagcctcaggttcttactctgtaaaataggtgggatattaaacatttcattagtgagtggctggaaagtccccaaaggaactttgaagtagaggagacaatcgatccatgagagacaaggcctcactcacacacacacgcacaaacacacacacttggtctagtcctaggcactcctcacaaccccggttcctctcatctcccgagttagtggcagagcttgccaccagccagagcacaggccctgtgatgacacagtggaaagaatacgcctgcctgcccctgctgcagacacccaggaaggctcacgcccattaccagcccccatcaggccaccaacgccgtacctcctgctgtggccaccaggtggcggccacatcaagcgtccctgaggcttggtgatttaccaagccccaacgagggatttccccttcctcaaacttgagaatttcacctccaaggacacatctgtggcacttggggacccacaccttgtgtggaaaaaattaaaacaaatatgctgagcccaactaaagcaggagagtgacagagatgagagacacatagagagagggagacacaggcagagaccagagacataagagagagacatgagccgggtgcggtggctcatgcctataatcccagcactttgggatgccgaggtgagtggatcacctgaggtcaggagtttgaaccagcctgaccaatatcattaaacctcatctctactaaaaatacaaaaattagtcgtgtgtggtggcgggcatctgtagtcccacctactcgggaggctgagacaggagaattgcttgaacctgggaggcagaggctgcaatgagccgagctcaggccattgcactccagcctggcgaaagagtgagactctgtctcaaaaacaaaagaaagaaagaaagaagaaaaagaaaaaaaaagagagagagagatgagagagtgatgacagaaagagagagagaaaataaatgaccactgtcaaaaatgaagacaaaagaaaccagccttttagatcagacagaccagggtacagatgaatcctagctctgcccctccaggccaatgaccttcagtgtgtcactctactctctgagcctgtttccttaactggaaaatgggactcatcatcctctctcccctgcaagaactggaaagcatctatcacagggtctagcgccacctagattttgataaatgataattatctgtattcattattataaggttgatgacagagtaattcattaatagttggggggggcaaaaaaaaagctggatcatttcacagtgcctttgccaacgctgctaggtttgcttggttctttgggggcaatcccctctctctttgatcagtgacttttcagggccccagaggtacccatccaaaaccccagccccaggaggctgggttggttgggaaaagcaatgcacaggtcttcctgtgacgggccgctactctctctgccctcagtgggacggtcagccacccaygccctggtccaggcccagctgatctgctcaggagccaggcggggcatgcacgcttttattgtgccaatccggagtcttcaggaccacaccccactgccaggtaagcccataatgctccctcaaggaaccctgccaggaggagagcccaggtggcctccctgacctggggccccagagggccacaggagtagctaagacatgtctcccttgggcagggagcggtccagttggacagacttggtgctaactggctaggtgaacttgagcaagatttagcatctttctgacctcagcttgttcacctgcaaaataggtacaataatcccagtgtcacaggctgctgtgacctggaatgtgtgtatgatacctgccacatagcaagcactctctcaactgataggtgtcctcatctccatctccttcaaggaatcatcaytggggacatcggacccaagatggactttgatcaaacagacaatggcttcctgcagctgaaccatgtgcgggtccccagggagaacatgctgagtcgctttgcacaggttacagatctggggaggccggggacttgtacttcctggagaggggacctgcgctttgtgcaggctgggcctgggtcctccatagagcttagtttgggccacataacctcctcccccaagagaggctctgatatcccacagattggggtgaaacccctgcttaggagcagtatgatcttgggcacagagcctcagacctctcatgcagaaatgctcrtcacataggctgacagagcaatcgtggggtggggtggcagccccaggagaggatagggctgaggtgacctgcataatatttacccacagtgaggcctgacacagccaatcgcccaacagataccagccagaatgccagcaggagttctgaaggtcccaattctgccaggcatcacccctttagttatgggtcgtggggaggtccggggtgtcccaggagaggcactgtgaagcagggcacttggggaaatggcctggtattttaacactccaactccagatgcgccggttgaggggcgaggtgccctccatgtgtggagccccacagctctggagaagcgagggcatcctgggaagccttggcccagaacttgtgccngtccttgttccacacaggtcttgccagatggcacctacgtcaaactcggtacagcacagagcaactaccttcccatggtggtggtgcgggtggagctgctgtcaggggagatcctccctatactgcagaaggcctgtgtcatcgccatgcgctactcggtcatccgccgccaatcccggctccggcccaggcaaggggtgcccagtgactgactacygcagatatgctgcctcttggtcccacagtgcctccccctgacaccacccttctgccagagccagagtgctgggagcaggcaatgccccccaccacatacacacacacaaacacaaaatctacccagcctggccccatctgggcatgtcagaggagtctctctggctgcctctaacagggctgaccagccggcctaacctgcatcctcagtgcctggcccccatcgggctctatgtgatagtgtctttggccctgtagcaccaggtctgtctgactctgtgtctgtccgagtccagccgtgttctgtgcggctgtgacgggttggacgggtctgggtcagccagttgccagctgcatcagactatggctggctgagttgattctgtcaggccgagcctagcaaaatccaatatcatatcgactgtgtgtggctgagctcgttctgtccagctgtgctgtcagcatcccactggtatgtctagtctggatcccttttgttgtaattggttgtgttgctaccactccctccaccycacagcacagaatagcaagggctgcctgaaccctctgtgaacactcagctcggccatttcacttcatmcctcagcttcctcagctacaaaatgggtgtggcagaagtggcctttcagtgtggtgtggagggtgaaatgcagtaaggcacattaagtcctcagcccagggtcctttcctctggcaagctcacagcgccctcgcctggcctgggcttcagaatctgggctgcaagagttctctggaggacagggccactgggaagaaggggcttctgctgctgtcctgcccgaggcccatttatctgggctgcagaagtgtccccagggtggttataagaaagatgcgccaggtaagcagctgctgtctgtagaggaggcttcttgtaatcacatcctctttcaatccagttactgcgagctcctaaatgccggacatagccttgggcactgaggacatagcagcggataaggcagacacagtcccttccttggggttccatcagacctgagtttacatcctaagagttattgtttaggcttgacatattcctcagcgcgcggcaagtgcacacgggcagtggaaggtcacaggttcaaatcatcacaggtgcagggccacaactcttcacctgaaatcttgggaccagacgtgttggagtctcagaacttttcaggttttaggataatactgtgtatatgctggaattctataagcctcccttaacaaggggcagtacccaccaacaaatgtgtcagtattcctgcagtgaaatgtgtggatgttcatgttagatgggatttttaaaggattatcaatggcctcatgtcagttcaagttttgcaatgagttctaaggaactgtctgtttttaaggtttttatggtgtcggggataggggaaggtggacacaacaggtagtgatctaaatcttctggttcttttcccttcagtgacccagaggcaaaggtcctggactaccagacacaacagcagaaactctttcctcagctggccatcagttatgccttccatttcctggcagtcagcctcttggagttcttccagcactcctacactgccattctgaaccaagacttcagcttcctgcctgaggtacctgctgtctgcggaggggcaggcgctggcaggcgctgggagctaagattgttccactcactggggagcagccacagccccatccccatgggcactccccacccccacctctcccagctttcagcatcccagggcgtctgggtgaacggcaccctggtatataaatttacccacaaccagcccccagagagctacaaacatactaagagaaaacaatcacacctagcgtagagaacacaggtccacaacccctgatgtgtatttgaaacctgaaaagctccgaaaaacagttgtttggaactcatttggtggcatagtttgacctgaactgacctgatttatccctctgagtgtgaatacattttgcagtaaaattattaatgtgtttaatcactaaagctgccccaaaccccactggggctattatataaaatgcactttaaatgccacttggcctctctataatccaaaagttactctgattcctaaacacatctggctcacaggtctcaggtaaagcattgtggacttacatatatagtaaaattcagtctgtccaggctaccatgctttataagcactgctcattaacccttccaactgcaatgaggcacagagagatcaagggacataactttcctcccaaggacttgaaagctccaaagataggcagggtcttcaagaaccaaaatctgaaagcagtcctgctgcccagcagcctctgtcctgttggggccactgtaacaaaataccataaagcagtggtttataaacaacagaaattggcctggcatggtgacttacacctgtaatctcagcactttgggaggccagggcaggaggattgcttgagcccaggagttcaagacaagaccagcctgagcaagatggtgagacccccgtctccacaaaaaaaaaaaaaatgaaaaattagtcaggtgtggtagcacacacctgtagtcccaactactactttggaggctgaggtgggaggattccttgagcccaggagtgcaaggatgcagtgagctgtgattgtgccactgcactccagtccagcctgagcagcagagtgagacgctgtctcaaaaaagaaaaacaaacaaatttattgctcacagttctggaggctgggaagtccaaggtcaaggcactagtgcatttggtgtcaggtgagggcctgcttcctgaacggctttttgctgtgtcctcaaatggtagaagcagcctctttctttcttttttttttttttttttttcctgagacagtctcactctgtcacccaggctggagtgcagtggtacaatcttggctcactgcaacctccgcctcccaggttcaagagattctcctgcctcagcctcctgtgtagctgggactacaagtgcacgccaccacgcccagctaatttttgtatttttagtagagacggggtttcactatgttggccaggatggcctcgatctcctgacctcgtgatccacctgccttggcctcccaaagtgctgggattgcaggtgtgagccaccacacccagccagaagcagcctctttcatgagggcactgatcccattcatgaggcctccaccctcatgacttaattacctcctgaaggccccaactcctactaccatcataatacctcctaatcctagtcctaatcatcaatacctcctaatcctagccctaacccttgagggttaggatttctacataagaattttaggtggacacattcagaccctgtcaccctcctacaacccagtaagtgggcttacagtggacacccatcctcataagctagctttctaaaacccaggccagcaaaatccgtaactcctggaggtttgtgggcccaatccaggcagcaccctcttcccaatcctggagacactggccaggccaggttttccttcactcttatgcccctacagctacattgcctaattgtgtgcctctgggtgagtcacataagctgagtacccgccttctcattcataaagttgtgagcagaggaaacacttcttacctcagagctgagctgggcatgagtagatgctcagtaagtggtgcacagggttggtccctatggtggaggccccctaacaccgcccaacccccctccatgttctcacagctccacgcrctgagcacgggcatgaaggccatgatgtcagaattctgcacccagggagctgagatgtgccgcagggcctgtggcggacatggctactcraagctgagtggcctgccatcactggtcaccaaattgtcggcctcctgyacctacgagggtgagaacacagtgctctacctgcaggtggccaggtaaggtccaggctgacccaggcctttgcccaagcccttggggacccaccaagcttctgttgggtggagggttccgtctgaggcccataaaaagagcaggctttgcgaagtgctatttgggagctgtccaattccccagtatgactaacctatccacttctaggccaccatcctctctcacctccaccacagcctcagacccctccctggtctcttgcttctatcctgtcctgcttctccacaggcagccggagggatctgttcagagcctagggaggatcacatctttctctggtttgaaattcttcaacggcttcccagtgctcataggaaaatgacatattctatgctgtggcctgcaaggtccatgtgacctgacccctgcctccccgtccatcctgctctcaccacctcctgcctctgctcacttcttcttcttctttttttttttgagatggagtctcactgtcacccaggctggagtgcagtggtgcaatctcggctcactgcaacctctgcccgccgggttcaagcaattctcctgccttagcctccgcagtagctgggattacacaccaccatgcccatctaatttttgtatttttagtagagatggggtttcaccatgttggccaggctgctctccaactcctgacctcaggtgatccacctgccttagcctcccaaagtgctgggattacaggcacaagccaccgcacccagccacctctgctcacttctgccggccacacacttctttctgtccaggaggcctttgcatttgatcccctcccacccaacatggccttgtttcctttggagcagtttcacaatctatcattgtctcatttttttgttcacctttttagctctactctccaactagattaggagctccctgagggcagggactacccctaccttgctcgctttagcatcgcctaagcttggtgcagagcctgcacacagaggctccaagcaatggccaagtcagcttcctccacacaggcgatttcttttcatccctcttaggtctgtgggccctggaggccgacwgagcctcatcctcacctattctcaggtgaacaaacagggcaaatgcttccctatgcaaggagaaagaagttcactggcaaatatgaaaaacaacatttattatatttttaaaaatatataacatcccttggtttttttccaaattagaaaaggagtacaatagcacatattatgtactctgcactgtgccaagcactctacaaatatcatctcattccatttcacaaaccctcaatcagatgagaactgtcctccccacctagagctagagaaacagagacttgggaggtgaagcttctttcatcacacaggtctcggcgaggctgtatgggaatccagggctgtctaagcccagaacctgtaaccactggattatcctaaagcagcagttgagagtcacctataatcctcctactcctgttagcattcttgcctctatccttcttttttcagctaagaaaatttaatttccacccagtcactgtacaagtcattataaatcccaaaatcacagtgttctgatggaaaattctgtttgctcagatcacagaagggtttatgttcaggatcagagagtgtctggcccagctccacaggtcctgggrtatgcctgactgagggcctcgaggcaggacggcccgagggggaaccctcaggagggaggccaggcagaggcctggtgacctggctctcccacgggaaggctggaacctagcatgagcttgcctgtctctgggagtgaggggtgctgggctgtctcacagagtctctgccctctcacctgcctcctcttccaacccccaggttcctggtgaagagctacctgcagactcagatgtcccctggctccacgccacagagatctctctctccatctgtcgcatatctcaccgcacctgacctggccaggtgtccagcccagagggcagccgacttcctctgcccggagctctacaccacggcctgggcacatgtggcagtaaggtaagccagtgctgagaaatcagccatcccacctgggcacaggctccatgccacactagggcctttggattggttgggtggacattcgtggattcagttctaaaaaccaccccatgcctagcctccccggtcctstcagttcctgccaccatgggcagagagaggggatgtcccccccatcagccatggacccccgtcacttccccatcctggtcacagtagtagaaggacatcacacctctggccagtgagatatttttaaaatctctagggtcctatggtgatttgcaatacaacgaatgtacccatatgtaaatactccaaatgtattgatatgcaaataccaataaataaagcaatactcactcgtacgtttgaaatatcccataatctaaaaataatttttgaaaatatgactacaccacgggatagaattcatttatttccagggtctagtaggctccagggaacatggacaaaaccaaggactcatccattctgtcattcaacaaatattgttcagtacctactatgtgttaggaatgaacaaatgtgccaggggctgggaatagagaggtcctgaccaaacacacataccaccatggaaaagatggaggtttaactacctaaaaagaaaacgttctgaatgctgcccccaaattaaaacaccgaaaacaggctgggcatggtggctgacaccagtaattccagcactttgggaggtcgaggtgggcggattgcttgagctcaggagtttgagaccagcttcggcaacatggtgaaaccccacctctaccaaaaatacaaaaaattttaataaaaaaataaaaaggaaacaccaaaaacaaactggaaaaacatattttcagtatataataagaggtcttatatcccaacctgtggtcccagggatggttaatagttatttcaagatcacaagcaacttggaacattcatttatttattccaaaaatatttattaactgcctataatatggcaggcactgttctaggcattagggacctatcagtaaataggcctgataaacaccccaaactcatagagctaacatttcaattgggagatttgaggaggggaagataaggctgctcgaggtgattaaagtgtcatggtatttctccttgcttgaaactcagtgtgacatctgcttatctattccctgacaaagcaaaaaacatattgcttaataaacagtttgctttacacacaaattctaagggtcatggatggatgggcagggaatagaaaataagaggggattaaaggttatttaatgactaatttagtggtttgcaggacaaaggttggttttctctttttgtttttaggtcccttgggtagaacctgcagcaggctaggtgaccgacgggcctctctagcctttacagaaaaaccattctccttgctcaggccacaggacgtcagtcaacaaaaaggcctgaacatactggtgtgaggctggaatctgcattagaaataggggacagctcctggcctgtggccctgaggctttataacatggcgattaacaacaagtcaaaatcctggctccactccttactagctgtgtgaccctggacaaattggttaacctctctgggactcagttttccccattgcaaactgggggktgcctgcccttaaaagagttaaaaagataataaatatcaatcatttagctttatggcacataagtggtcaataaacaggcattatttctacttctgagggaccacaggaagcccatcagttgtcttttccactcagtcaggaagctgaaccttttttgctttggctttcaggctcataaaggactcagtgcagcatttacagaccctgacgcaatccggagctgaccagcacgaggcttggaaccagaccactgtcatacacctccaggctgctaaggtgagcgcctgccagctgaagctgaaagggatccattttgcttcccaggcaggctaccctgctgggaaaatccgggctctgccattattccccaactctgcttcagtggcggctgccctcatttcacttccaaggctttagtccagggtattttaattaaaggacttaactccaaagcaatcttgctggcagctcttaggggaaaaggtaatgaggcagtgttattggatttgcttcaggttgttcaaatatttcctcccagatagaaaagcaggtcaagtctccccttagccccacaggcaatccttggatgtctgattccatttccactcgttttgtgtttctgcataattcacagtcggtcggcaaatatttgagcacccactctgccctgggcactgacctgggtgctcaacagtgaagccactgcccatgcacggctacaatcaaggaagcaccatgacagggaaatacaggctgctatggaatcccagagcaggtacacttctgcccacctggaggagtcagaaaggcttcccaaaagaagtggcatatcagctaagacttcaaggataagctgaaattagccagctaaagggtggggtggcagctttggagagaaaagtttccaggcaaagggagctgcgcgtgcaaaaggaagcagcaagaaggatcctggtgtgcttgggaggaagtgcaaatctcccaaggaggacctaaggagaaggactgagacwaggggagaaggagagacaggcaaggcctctgaccttttgcaccactgtgaaaagttggggttttgttttcattgcaatgcctttgctgagtttgtttggaggtggggtaaagtgatcagtttcattctagaagaatcatgcaggttgcccaggatggaatgaaagsgagcaagttagaaaggagcaagtctgaaccgggactgagggtggtcctgaccatgagcatggcagaaggcctggagacaagtgggtagatcagagatgctaagggggaagaaggcagggacaggcctcagagtgctggggtgggaaagaggtaagaacaactcctgagttctagcttaggcagctgggactctggcaccgccaataactggaaaactaaagtgatcacgccaatcctcaggcctcagacccagaaaatggcagccttggaacaggagagccctgaagggctgcagaggccctcgtgggacagggctggtcaggcaggctggacgttgagcaccaccacgtgacccaccacctccaccacaccacacgtgatgggattacctctgcagccctcagttctgctcagcctacagcaggggcaccccctgctgtgctaactgtcctgtcaacacagaaggtgagccaaggcttcctgctttcactggatcannnnnnnnnnnnnnnnnnnnnnnnnnnnnnnnnnnnnnnnnnnnnnnnnnnnnnnnnnnnnnnnnnnnnnnnnnnnnnnnnnnnnnnnnnnnnnnnnnnnnnnnnnnnnnnnnnnnncttgccagggttacttcatttaatccacacagccctggggagggagactgacattatttccacttcaagggtgaggaaagagaactcaggacttaggtcccagaggtaggaaatagctgagtccagatgctttcccttcccacaccactgagggtgtgatgagtgactgaggtgagcaacaaattctggggggatggagggtgacagccagccagcctgcgggggaagaacacgtccctgacagcttcctggggaggtggtgccccagctgagtctccaaggtcataatggatagggctttctgtactctctgtgctttgtggggttatttagtctacagaaagcttcagcacccaactgggccccatctagaaaccataaatgtgcaggtagagataactgcaacttgagggaagaggggatgatactgccagaagagtagacaagggggagccacgggctaaattctggtcccagctctgtgtgacctcaagcagccccttccctctctgggctttaacttccctgtctgtagacaaaggggcatggaagagccctttaggctctgtcaggccgtggtcctataattcagactctgaccagaagagatgtcagtctccaggaccatgggaacaaatgctggcctcattataatccagcctcagtctcctgtggctttggccacacagggttaggaatacagccctggtgtggatctcactgctaccacttcctagccatgaccttgggcaaaaaacttaatctttcagagcctcagtctcttcgtctgcaagatagagctaataacagtacctactttgtaggattctaataaagattaaataagtaaaacttagagaggcagctagcacccccacccccaaattagacaggaggcaagatttaaaccaacacacacaatgtaaataatgttcactgtgctcagagcgtggggccaaggttcagctcagcccttccccaaagtgtagaggtcacctctgtctctgatcctcatcctgctttttaaggcccaggcccctgggcagctctccatcactccactcctcaactcagagccttgagcatttgaggatgtggctctcagattaggacaggaaaaggagtgcgggtccgcagttctgccaagctggacccagtctgagcaacaaaggctactggagccagcagaggcaacacagcacatctgctcaccttccacagccaaatgctgcaagcccagcatggctgtgagcacaccatgtctgaatggcaaagtggagttgtcagcacctgtgtgagggccccctaggaaacacaagttctttccaagtgagaaagcggatcgggtcactgcccagctgaagactcccagtcccacagagcaaattctgaccatgttattcacagcccttcactgacctgggccccaggtatgagtccaccctaacctccatggttccccatcatcacctcattataccaccacacttcagcctcattaaattgcctgcagcttcctgaaagtacagccttttgcacataaagctccccctgcctggaatgacctttcccccaactcatgtccgcctgggtgaactcctttgaacccccaaggcactctttttttttctatgatagagtctcactccaccacccaggctggagtgcagtggcacggtctcagctcactgcaacctccacctcccaggttcaagcaattcttgtgcctcagccttccgagtagccagaattacaggtgtgcaccaccacacctggctaatttttgtattttttgtagagacagggttttgccatgttggccaggctggtctcgaactcctgacctcaagtggtccgcccacctcaacttcccaaagtgctgggatataggtgtgagccaccgcgcccagccgaacccccaagacactctaagtcttgctactgaaaatcactacagcagcatgggcatcacaggggaccttgttagaaatgcacagtctcaggccctgccctggaatctgcattttgacaagatccccaggtgatctatatgcacataaaaaactgagaggcagggcggggtccagaggctcacgcctgtaatcccagcactttgggaagccaaggaaggaggatcacttgagctcaggagttcgagaccagtgtaggcaacatagcaagaccctcgtctctactaaaaatacaaaaaaaaaaaaaagccgggcatggtggtgtgtgcctgtggtcccaactactcaggaggctgaggtgggagaatcacttgagcccagtgggacagaggttgcagcaaggcaagattgcaacactgctcttcagcctgggtgacagagtgagattctatctcagaaaaaacaattaagaagcactgctttatactttctctcttccttgctctcccttatagaactcatatatcctacctgacaaaataattgtgtgtgcttgtcttgacgagatgcggactgttcaaaatatgttacaaccagtaggacaaggcaccaaccaatcaaaatggactttagccctaggggaagcaaggtcctgaaggcctcctgctgagtcaaacattaatcctttagttgctgggctgtggagagaaggagggggtcttcgggaaggagtccatctggcagaaggggctctcacagggttgatggcagtggacagttgccagctggtattaaagtattatttttacaactgccacagccagaccataacatatgggctaaataacagcactgcttaccttaaggagtttatactctagctggaataaatttcatatatatcttgaaactttctcaccccatggtgcacacatgtgcacgcacacacacacaccactgacttgaacacagcagacaacaaatagctattttcttttcttttcttttttttttttttttttttttttgagatggagttttgctcttattgcccaggctggagtgcaatggcatgattttggctcactgcaacctccgcctcctgggttcaaatgattctcctgcctcagcctcccaagtagctgggattacaggcatgcaccaccatgcctggctaatttttgcatttttagtagagacagggtttcaccatgttggtcatactggtctcaaactcctgacctcaggtgatccacccaccttggcctcccaaagtgctgggattacaggcgtgagccaccgcgcccagccttaaaatagctaatttcttaagaacagtggtgctgtcctccaccttccccaggccagcctccaatatgcctgtattctttccttctactttccaacctacttgaaaccgctccaagcaaaagaaaacaagggccatgtttcaaagcccaccagtcccccccgtccccgctccccccccacacacacacatatacacaacatcaaaacgccttgatcagacccagagctaggagaaaaggcagctgctcatcagcctgctgggaagcacatcatgcctcaagtttattccagccatcttgccatgcttccagggtgacttctggagtagaaaaccagaaatcaggagaacatatctttgtgtctttgtaggtgcactgctactatgtcactgtgaagggttttacagaagctctggagaaactagaaaatgaaccagcgattcagcaggtgctcaagcgcctctgtgacctccatgccatacatggaatcttgactaactcgggtgactttctccatgacgccttcctgtctggtgcccaagtggacatggcaagaacagcctacctggacctgctccgcctgatccggtgagtggcagagacttcaaaccatgttagtcttcagagaataaccctaccccttgttcacaggtcacttccaactccaaaaccttgctaatgggcagagcagcaacagccctggagaggtctacaccctattatcattacaccagcataaagcattatgaattaatgaaagaaaaaaatgggaaaaaatgggaaaaatactgaagaataaatgagctacctcakttgaactctttacattgtcaaggaaataggaatagtatctaaggaaaatcaataaaatgaagcatgctacatatgaatgatatgtgctaatgtgctaataatagtctcaaccatagctaactttttttttcttttctttttttttagacagggactggctctgtcacccaggctaaagtgcagtagtacaatcttgtctcattgcaacctctgcctctgggttcaagtgattctcctgcttcagcctcccaagtagctgggattacaggtgcccacccccatgcccagctaatttttgtatttttagtagagatggggtttcgccatgttgaccaggctggtctccaactcctgacctcaagtgatccacctgccttggcctcccaaagtgctgggattacaggtgtgaaccaacgtgcccaggcatagccaacctttaaagagcacttatgtgacaggccctgtgccaaaagcttttacatacatctcatttaatccttacagccctttgaaatgggtactattaatctcctcattttattggaaaggaaattcaggctgatgggagttgcccagtatcacacaatcagccagaggaggggctgggtacaatctcaggtctggcccctgggcatgagctcttaacctgtatgttaaggttaaggttgaggtattatatactttgaacacatcctagtctttgttgaatgtgcttaagcaaattcttaccaagtttagtaaacttaccttaatcttccctcagcttcaagatgaaaaattttttttaactctgtaattcatatattgatttataaaataataacannnnnnnnnnnnnnnnnnnnattattctataatctaaacgattgctttaaaaacatatcaaaaccaaagcccaacctgatcagagtcctagaaaaaatagaaataaaaacaataaagtaaaaaaaaaagcctgggcaacatggcaaaaccccacctctacaaaaaatgaatcaggcacacacctgtagtctcagctactcgggaggctgaggtaggaggattgattgatcccaggaggttgaggttgcagtaagctatgatcacaccactgcactccagcctgggcaacaaagtgagaccttgtctcaaaaaaaggaaagaaaagaaaacattgcaaattatttaccattgtccataagattaaaaaaaatggactaatttgagaatataatctttttgagacctcactgggcagaaaatatgatacctattgcatggggttagaggcgactcctagaatctccaacaattcttatatcaacaagactaataaaaagaaaaaaagaggctgggagcagtggctcacacctgtaatcccagcactttgggaggccaaggtgggaggatcacttgaggcaaagagtttaagactagcttgggcaacatagtgagaccctgtctctaaaagatttgtaattttttaaaaataagattttaagacaggtttttaaaaaactagaccaaattccttttatttctcacaatatgcaatatgttacatgccctttatgactactcatagcatgtaacagatagctggtggtcaaaaaaatgtttgttcaggccaggcgcggtggctaatacctgcaatcccagcactttgggaggccaaggtgggtggatcacctgaggtcaggagttcgaggccagcctggccaacatggtgaaacccggtctctactaaaaatacaaaaattagctgggtgtgatggcacatgcctgtaatcccagttacttgggaggctgaggcagaatcgcttgaacccgggaggcagaggctgccgtgagccaagatcgtaccactgcactccagccttggcgacaagagtgagactccatctcaagaaaaaaaaaaaagtttgttcagttaaatcatcaaaaactgtcaaaaatacgtttgacacaattatgtcccaggtataaaactttccctaatacagggaatccagtggtgaaaactattaagagcataattaagtactgcacagttcaagcccaagggtgtccatctttttgaaactctcagaatttaaaagcacttgaaaataatgttctagccccggttgtcagtgatgataaaatacaaaagattaccttaacaccctataagcatgttttttaaatttgcaaacagcatttctaagtgcttgccttggctccagaaacttacaattcaagacaagacagacagcccagatgcaatctgccaacttactcatgcgtcaaacccagaaattgatttacttccatgatggttcctaagtagccttactactgcagggtaattaggcacataacagattctatgcatatcactgtttggtgtcacagttccctgccttgattagtcactatctccctaagatttctgagatgaaaactgaagggcggcatagtatgctatggatgccaagaacaagctctctgcaatgttaactgacccaaacagtttttagttgtttaagcggtcataaaacctcagctggggggacttccaggtaaagatgacagattaaactatgcatttacttctgttctttcccgaaaccctactaaaacatcagtgaatggactgaaattttttaaaaggcataaacccacaaagagaaagagatgttgtctctgtgttgtccaggctgctcttgaactcctgggctcaagggatcctcctaccttagcctcccaaagtgctgggattacatgcatgagctaacacacctagcctctgtgagtaattttaagactttccttgactctgccctggcagaagggtaaatagaggatctgtggactagggagcatcaggtatagttgataataaggctacccttcagaaaacacagggttctttataggccaaatactgacacctccctcccccagaccttttttcccactggttcctaaaaaactggcagccagactagtaccctgcaagaagatggtaagatgatccttctctggagaatctgaccagcccaaggagaaggagctaaagacactgacatcagagtcccccaatggtccacccaattcactccatagtgaaccccatactagcaagcatagccacaagtttgtaatcagctagttaaggctttgcttttagctatgatcagacactcagggatcaccaaacacctgaagaatgcccctaacataaaagatggagaccaaaacaagcaagaacaaggcaattcagaggacataagagaatccacagggagaagaaaacttaaaaaaaaaaaacagtgatatctcagagttaagagacggtattgcaaccacaaaataaaaacctgaatgccattatttaaaactaatattcagagaacctaaaaaaagagctccttgaagttaaaaaatgataatggaaatgaaaaactcaatgtaaggactggaagataaagttgcagaaatctcacagcaagaaagcaaaaagacaaaaaaaaggaggacttttaaaaagtaagaggaccaatcttagctgttcatcatctgaagaacaggtctagaaagaagacagagaaaacagaaggaagcgaatcattaataaaataattcaagaaaacattcctcaaatgaaggatacgagtttcagatgaaaaagggtcacagatgcctacagactagaggagaggagacaggcacacacatgcacaaaataagtcacactgtataccatgtgaaatggtaatacctaccatgaaagaaaggatagcaggaagtggaggaaagaatgctgggggtcagtagggaggaggggragctacaattttaagtaggccagagaaggcctccctgggagggtgacatttaaggaaagacctgaggagaaggtagggagaagctgttgtggctgctagggaaagagcattacaggcagaacataagtacagtcatgcatcacttaatgactggaggatccgttctgagaaatgtgtcttcaggtgagtctgtcatcatgtgaacatcacagagtgtacttacacaagcctaaatggtatagcctattgctcgtacagtcacacctgcaaagcatgttgctgttctgaatactgcagccaattctaacatcaatcactaagcaataggaatttttcagctctatcataatgtcatgggaccgccatcatatacatggtccatcattgaccaaaacatcattatgcagtgcatgacagtacaaatgttggagaccagagtgtgcttggcatatccatccagagaacacagaagaggccacaggggcaggaatggcatgactgcrgtggaaaatgacggcagagggcagagagttaagggagtacagtagggggtgggaagagacggtaaggtagatcattgcaaagacttaagagaatgcgagggttttgagcatgggatagaatgggagggttttgagcattggatagacacaacctaaaagaatctgatgtgtatttttaaaggcttgctccagctgccatattaagaactaagagtgaaaagcagggagatcagctggatcgctaatgcaatcatccaagtgagtgatgatagtggattggagcagtgacagtgctggaggtggtgggaatggttgaagtttgaatatatcttgaaggcagaacaggatttgctgacagattagatgtatggtgagaaagaagagaagaatcaaggtttttggtcagaagggcagagctgccatttactataaatgcggaagactacaggaggcccaggtttgggcagggtggacgggaaggagtttgggttcagatacattacttttgaagagcctatcagaaatccaagtacagatgttggtaagcaggggacactggarggataagtttggaagtcattggcgtatggttgatatttaaagccttgagaagaacatcacaaggagtgcatgaagagaagaggtccaagtactcagtcttgagaccctcgcaagataataaggaagtaaccgtggcaagagctatttctgtggagtggtgggagtaaaaacatgaacagatccagttcaggagagaatgtgaaaattggaaatcataagcataaacacacataacactttcagggagttttgtcctaaacgggagccaaggtgatggagaaggaaatagagtcaaaagcttgtgtttaagatgggagaaatgattgtctgtttgtatactgatggaaatgatccagtagagaggggatttttttttcttgtacctttctttgaacttgatcttggcctcccatcacgccttgtgtttaagagcaaggtctttgaggagatccttgttgatgacagtttgtccaagaggatatctacagagtaccttgtgggcatgaggtgattgcagttataagcttttgcaaaagacttgatccttgacctcttggagatcttcttgcctatggcagctgtcactttgtgaggatagcagtcaattccagctaccaaagcatgactgtaagaatggactgaggtgccatcatcaatgtccttcatgataatggctttgcgtccagagtagcatccagccaggaccagcaccactttcccactttttcatgaacttgcccattttgacagcaaccagccaggcctacagtaaaaagaaagaagggcatttccactaactttttacccctgaggggaattttgatgttgttggagaaaggcaggagaatgttgttctccagtatgcaagaggaaaagacatctagtagacaaggagggactgaggcctgagctgagagcctgaagagagaaagcattgtatgtataaatgcaagggtgggaacttacacagattctcttactgcttccacttcattagtgaaatacgatgtaaagccatccaggcaaaagagatgggaaaggtggatagtgtcaatctgaggatcaaagagatggtaagaaataactgcctaagaaaaagaaacagtaaatgaacaatgagtaaatatagcaatgtaatacgattgctgagctgcaatcagggcccacttgagcccttattacaccagttatgattgttttttccagccatgtatagctacaaaggtggtggcacaaagtgggtggaaaactaaagacaaagaggtatgcgttttgctaaacaggtatgacaaagcaagaaaaatcgttgagtgtgtgtgtatatatatatatatatatatatatatatatwtttttttttttttttttttttttttttgagcgggagtcttgctctgttgcccaagctggagtgcagcggcacgatctcagctcactgcaacctctgactcccaggttcaagcgattctcccacctcagccttcccagtagctgagactacaggcacacaccaccacacctggctaatttttgtatttttagtagagacagggttccgccatgttggccaggctggtctcgaactcctgacctcagctgatccatctgcctcggtctcccaaattgctgggattacaggtgtgagccatcgcgcccggcctgttgaatgtatttttgagagagtaatagaacatggaatttcagctggataaggaatgaagtgagaccacaagggggcagggggacattaaattggcggtagggctcatatgatgttggggatcatcaagaaacgattacattggatacagtatcccagttaccaccaatgctttaatgacacacaatcatcataatgtcaatactaaatattggtctggccaaaattataactatattgggaggcccgaaggccaggaggaagaagaatgggaacaaggggaggtaggagtgaagagagggggtgataaatataaatctttaccttttgaatgaagawtcaacagataatatctcaaactgaaccatcaacaagcagcaatataaacaagatattttgacattcagataaatactgaaatatcaactaaaagattgaaattgccagccgggcatggtggctcatgcttgtaatctcagcactttgggaggccgaggtgggcagatcacctgaggtcaggaattcgagaccaacctggccaacatggtgaaaccccatctctactaaaaatacaaaaatcagccaggcatggtggcaggcgcctgtaatcccaactactcgggaggttgaggcaggagaatggcttgagcccgggaggtagaggttgcagtgagctgagattgtgccactgcactccagcctgggcaactgagactctgtctcaaaaaaaaaaaaaaaaaacagattgaaattgcttctgaggaaaaagaagtggaaatcagacaggtatatgctcgttatttatttatttatttatttattttgggacaggagtctcactctgtcgcccaggctggagtgcagtggcataatctccactcactgcaacctccgcctcctgggttcaagtgattctcctgcctcagcctcccaagtagttgggactacaggcatgtgccaccatgcctggctaattttttgtatttttagtagagacggggtttcaccatgttacccaggatggtcttgatctcctgacctcatgatccacctacttcggcctcccaaagtgccgggattacaggcgtgagccaccacgcatggccggatatgctgtttttttaaacaagccttacggaaccctttgactcattatactatgcacatataactgattaaaaaataaaaactaaaaaaaaatgctgaattgtttgaaaagcgaataatcatgcaacctctaattaggtattgttattcaccatccaagactagtttgattcataagagcaatctaaaatacttacaaactcttgtttcctatcccaggaaggatgccatcctgttaactgatgcttttgacttcaccgatcagtgtttaaattcagcacttggctgttatgatggaaacgtctacgaacgcctgttccagtgggctcagaagtcaccaaccaatactcaggtagttgagtggaacacattataaattatgtaagaaagcagagaacaggcagtgaatacaccytcatgttctcscattttaattgattcccgttaggttggcaatcacttggcgtagcacgtctgtttaaaatattcttagagaacacataaaagaaacaaggagtggcagtatggcctggcaggaactctgagcctggattgtaatcagcaaaatgcactgctyggaacttagtaaagggaattaagaggaaggcccaagctctaaatcatggcttgacagacccaagtgcatacacacagagtggtaaactggcttttaagtaacaaaaagaaggagataaatcactgcggtaattgaaccaccttattttcagccttttaactttcagttttgtgtagataaaagtaggtattcagaagtggtaggaagcttgagggatgtctctcttagacctgattgcctgctagagatgataccctctcctcttcactctaaggaatacaatccaaggagcaaagaaagctgctgcactgccattagtagcccaggaaagccatatgagtgacaattaaaagggtcatgccaaaaaaatccccagccatcctaggagagcacaccagaactctacatcattaacagcgagaagacggggaggactcataaggtcccaacactcaagggccagggtatgctcgcagctctatgcttatgagcctctttgggaaaagttgtaaatgtcaatgaatatgttaacaggagtgaggtaataaaccctgtagttagaatatgaggaaccaatatttaatagcagattttacatagatgatcaaaacaaaaagtctataggtacaaaacagattattttaaattttatagtgcaaatacatgattcaggtggtgaagctttcttttttacctctttggtccaatttcagaaaaggtgtcttaacaccacatcaaattggcaactctcaggctttcattcacacccagcatggtgttagacttgctcttaacaatttgcagcctgtcataccacatggcttaatttaacatgattatctaaagttacaacacaactaacccatcttggtcactccctgtccccagaaagacatccttttaactcaaggaaatataaacaatatatgttcactgctttagtacagttaacctacttccagtgtgttactttttctaatgattagatctaacatttcaatcttggcataaaaatacagcagtcctcccactccagactagcttccatggtctaaagataaatgtgtgccctttggtgctccacagaaaaacccgccctgctataacacctgtcagaaatgctgacatatatagcccaaacctgttatactggcaacacaggaaacattctggtttctctagagagaatggagggggctttcttgtgttttagttggttttaatatttattttaaaagactttaatctggatactacatgagaacatgtttatctaaacgagaggaatgactgacccagagggtcaacacatttgggaaaacattgatgcacttcatcccattcacttctatctccttccacttgactgtgaacaacgaaggagtcttcaccttcccaactccaagatctatcacagagtagacactccacgtctatggaataaatgaacatggttttacaacctgcatagtgagacaaaggaatctgctgcatacacagtgccacacactcttgtcatcctagcttatattaccttcctaaaaaggtgacaggtatagcattgtggatctttcacgcatgataatttgggaatgtgaagttacaaatgaccttagtgaactgtttccagtcagttaaaatgacatgaggctgcctgctaatgtacatgatcttacatttctggctccttttagagatcaccaaaatagcacttttaaagtgtattttttaatgtgctgtggataattttttaaccctactcttaagatataatgctataattttgaagctgcaataagagacattttcctcatttgcactaatagaaaaaggcacactacagatattttatgtatttttatttattattatttttgagacagagtctcgctctgtcgcccaggctgaaatgcagtggcacaaccgcggctcactgcaaccctctgcctcccaggttcaagcaattctcctgcctcccaagtagctgggattacaggcacaagccaccaaacccagctaatttttgtattttgtattagtagagatggggtttcaccatgttggccaggctggtctccaaactcctaacctcaaatgatccgcctgcctcagcctcccaaagtgctgggattataggtgtgagccaccatgcctggcagatattttaaataaaacagcagctatgttgaaacacaccctgtagacataaaagtacagacaggaatatatttcactgacatttttctaccaaaagaaaagtgctatgctaaggtaaacatcttagaatcataggagaagctctcttctgtctggggcagcgttgagctttattcctggacaggatgatgtgctttccttggtttaagggaagaatcattggggataatttcaaaacaaaaatcctgtttttccccaattattctattgtaaaaatgtgtccaagtaggagttagatgcattaaatacatctactgattcattcattcaacaattcaacaaatatttactaagtacatgctttgtgccaaaaactattactagatactgaagatacactggagaacaagannnnnnnnnnnnnnnnnnnnnnngagtttgagaccaacctggccaacatggcaaaactccgtctctattaaaaatacaaaaattagccaggtgtggtggtgcacccctgtaatccaaggtactcgggaggctgaggcacaagaatcgcttgaacccaggaggcggaagttgcagtgagccaaaatcgcaccactgcactccagcctgggcaacagagcaatactgtctccaaaaaaaaacagtcaaaagcccagtgttcgaggagcttacagttttagtgtagacaggcacacacacacacacaaagtaaatattataaaagatgagactagaactaagaaacaaagaatcaagacactgaattacagcataatgaggataacctagtcggacctagaatactgcttatatgatccctatctggttccttgctttgtgattaatgttcagtttcagagagcctcaaagagtcaagccttttatttgtatgaaattccaaaagcaagtgataagctgtgtttttaattggccacctgcatccacaatttaaaatctgcatgagaaaaggaaggatgccctttggaaaaaatgtttctccatatgttcacacaaaatgagtcttagaaataatttttaaaattaagaatcttacgtaatgttactttttgaagctagagacttaatttgaaagtgaaagtcattaatcctggcagaaatgtactgtgttaataatgcgtttctttctacaaacaggagaaccctgcctatgaggaatatataagaccacttttacaaagttggagatccaagctatgaaataaccaacagtattcaagaagcaaccagcaccatcatgtgataatggtactatggcatatatgcaacattaaaattttaaattagatatttatgttttagagtcattatcttttagatacagtctgaagtgatatatgtgaaataatatctgtgatttacttcaaaataatccataggagaaaaaagccaaagtgaacagttgttgaagctggtcaatgggcaggtacatgagtgttcattacactatcctctctacttctgaatgtgtttgcaatttccagtagggcgtggtggatcatgcctgtaatcccaacacattaggaggtcaagatgagaggatcacttgagcctagaagttcgagaccagcctgagcaacatagagagatgccatctctacaaaaataactatctcacgcctgtaataccagcactttgggaggccgaggcaggtggatcacgaggtcaggagatcgagaccatcctcgctaacacggtgaaaccccgtctctactaaaaatacaaaaaaagtagccaggcgtagtggtgggcgcctgtagtcccagctacttgggaggctgaagaaggagaatggtgtgaacccgggaggcggaggatgcagtgagccgagatcgcgccactgcactccaacctgggtgacagagcgagagtccgcctcaaaaaaaaaaaaaaaaaaaaaactggccaggcatgggggtacatgcctgtggtcccagctatagggaggctgattgcctgagcccaggaggttgaggctgcagtgagccgtgatcacatcactgcattccagcctgagcaacagagtaagaacctatctcgaaaaagaaaaagaaagaaatttcccacagtaaaaaaaccgtaccactgtccatttatagcatctatttggttaaatacaaggattttgctgtagatctagcaaaagccaataggctcattagttagtgtgtttttcgcacacatttatccttgggtttaaaaggacacacatacatgcacacacacaatcctcctaagtgcgtatacttgctgtaatctaaataaaatacagctctaagaatgcaactatcattttttaaaaatcaactcttccacagtgatgatttaaaatttcattaaaagacataactgtctcaagttacccaaataaaatgaagctacatttttcatatcattttcaattgcccaattagacaaaacactctaaatgtcactagacaagtaaaatggcaaaaaaaaaaaaaaaaaaaaaaattcagctggctacttttcctaatttactcatataaacaatcatttcattgttaataatcagtaaatttgagaaaatttaccaaaagcaaacttatctccagtaaacaggacaaggaagaggcctcataagtttttaacttttaaaaacttgggatgggcgcagtggctcatacctgtaaacccagcacttcgggaggccagggcaggtggatcacctgaggtcaggagttcaaaaccagcatggtcaacatggtgaaaccctatctgtactaaaaatacaaaaattagccgggcatggtggcgcacacctgtaatcccagctactcaggaggctgaagcaggagaatcacctgaacctgggaggcacgggttgcagtgagccaagatcgcgccactacactccagcctgggtgacaagagtgagactctgtctcaaaaataaataaataaaaatcatttaaaaataaaataaaaataaaaactggaaactagtattattcctatttccccacttgttttcaacccaaatcattttatttcatattgacctcagctagctcaacaacacgtaactggttgggccttttttttttttaaggtaactatcaaatcaattttaaatacaagataattttccaaaatgataaccttgtactcgtatattgatttactgaaaccacagcaacctgtcaataacatcaaaggatcttagtttgaagatggtgaaaatagggtaattacaggtttctggatgtgggtcatttgtcacattttaaaataaattttcagagacgtgggcaaaaatagacataaggaagtgttgtcatcttccttgcagagagagaacctcagaatattctcacagagagaaggagaaaaggagtggcctgcttgccccagggcacacagcctcagagctccactcttcccttagaaaatagggaataaattacatgacttccttttatactgtggtctaacaaagtaggaagtctcagtacaattaaaataatccttcctatgagttactttcaagaaatagaagcacatgaactatgcaaaataagactacagtgaaataaataaaagtacgtgtatttctccaagtacgtgcatttctccaaccgttctaggtcattcattcactgcagtttgtttcttctcttcagaaataaacttaactttgttaacaaaatacatttgtcgattagcacaaaacatgagcataaagggctaaagtcattttgttcctgtgcttagcacaaaactgaaataatggtcatagaactgtgggcaattaaagtaaaatctgtaaccttcaacataaattcttttgaaaaaatatgaaaaactgtatgttcactgttcaaatatgcacccttttagtcaaaattaataattccatccatccttgtttcagtgacgcaacagttcttataaactgcaacctaagatcccactgtgtcctctcaaatcaaatacaaatgtgctatgggcagtaaacactgggacataaacaatgcatattttagacaagaaatatgattttctccccttaagtaataataatcaataaatacaaacttaattttcatatttcattttttattagttttgttttttttttctggtagacagtacacttgggaattatactgcaccaggcataaagagtaagttttctaccacagggacattttgtattcagaattcaatataaatatttctagtcagacatttccatggctacagatatttggttccttgatttatatgcatagaaagaaacagttgtcataactgtaaaaagcagtacttaataagtacttttaaatgattggaacagttttcctttaatattacaatactacttatttattggtttggaaactaggtcaccctacatgatgttttgatttttctcaaaggcatcatgagtactctgcttattctttcattcttgtatttttagccttctagttgagttagggaccattttatcagaaatcattttagcactgtaataagaaaagctctgttaagggtagattatataccataatgattttcagacttctttttataaaaaaggtatctggagactctgaacaggcacatgcatactcagggggaagggaacaaaacatggaggagtctgccaaagcacaaaacttccttctggtcctcactgccttcaaataaatacaactatttaaaagaaaaaaaatatctcacactgtgatttaaaaaaaaaaatcagtatcttccatttcctggagagtctttccaggaacctgtggcagggtcggagatcagtcgtctgtcttccgggctagcctacagaaagtccagttgtgctccactgtgttttcattggcccgctcactcatgtgatgcacccgggtgttgcggatcgtgaaaccttgttttgtaatgtattccatcaggtggaccctaagagaaacttcctggtgataatcacagggtccaaaagtaaaggaaacctggcagtctctggtgtccatcatgtgcttattccacttggtaaaataatttgagatgccttctagtaaggaatggaccttagtggtgatggttagttgcgttatgatgacagccactgggttggagtacttagaaagcttccgagtactagacagctccacaacttcttcaaaagtatccatgggatacaaaggcttaggatcattgagacactgaatcaagggctcaatctggtaaaaatctgcttctttccgaagcagatcaaattccttaaaatccaacggtaaggtcaattctgaagttcttaagaagttgaggacatatcggaaaagaggtccatctcgatcaataaagtaattgccttgagggtctcgagctgtggggaagtcccccccaaacatagctccaagcatggaatccgggtaacgcgtcaatgtggtgagagacgttgtatacaagtgtccacctacatttaatgtgactgggtcagtcatctgaaatttgtaaagaaatgatcagtcatctgaaatttttaaatactaactttgacaaattaagaaagtaagtgatactgagcaaagcccaagattctttcaggctataatgtatttagtaatcctctaatgcaaaatgactttactaccagcaataaacccacccagatgaagtgatctaacatttgctttcaatagaaaaaaaaaggagaaatccaatttctctttaaagacttatgctaagaatacagggcattgacttccagagccaaatcatttcaggcccattatctatagagttttcaggccagaatatatgtgggaagggaaaagccacgctaaaatacacttatttttttctgatttttttttaaggcttgcatttttctgaatttaatttaacattagatagaattaaaatgatctgataatatagacatttactttcaatatttctttggtttctccccctcaaacaaaaggaacaaactatgaaatttgtttttaaaataaaaatttgggccaggtacagtggctcatacctgtaatcctagcactttgggaggccggggcaggcagattgcctgagctcaggagttcaagaccagcctgggcaacatggcaagaccccatctctattaaaaatacaaaaaaaaaaaaaaaaaattcactgggtgtggtggcctgagtagtcctagctacttgggaggctgaggtatgagaatcacttgaacccaggaggcacaggctgcagtgagccaagatcatgccacttcacttcagcctgggcgacacagagagattttgtctccaaaaaaaaaaaattatttaaattaaattaaaaactgtgcagacctaatcttggtaactttttcatggaagtgatactttcaaatactaagttaaaatatacagtttagtcaatacaaccaagccagaaaagcatcacatacccaaaagcttacagcagccataaaatttcataatctgatagtgtattcacttttgtaacattaatgctgcaatctggcctttaattctgagaagcaagcttctcttaaaaaacataccttcagttttagaaatactatttacgaaaaaaataggccaggtgtggtggctcacacctgtaatcccagcactttgggaggccaaggagggtggatcacttgagcccaggagttgctgaccagcctgggcaacatgacaaaactccatctctacaaaaaatacaaaatattagccacacatgttggtgcccacctatcgtctcagctactcaggaggctgaggtgggacaatcacctgagcttggaaagtcatgagccgagatcacgccattgcactccagcctagggaaaagagcaagaccctgtctcgaaaaaaaaaaaaaaaaaggaagaaagaaaaaagaaaggcagacagagacttcaggtataggcaagtaaaatataccttacaccaaaggaatagaaaaatagggagacatatgcacacacaaaaaatgcaagtggggagaagaggcactttctcaaccattaatctcccaaaccacaacaaaatatcctccaaactcactagatccctttgtagtcactattcatgaagaaagagtcttcagagcaacacacttgaaaaaataaaaaatcacgttacctctccagtgattatannnnnnnnnnnnnnnnnnnnnnnnnnnnnnnnnnnnnnnnnnnnnnnnnnnnnnnnncattttgagtttgattccattaaaacaccaaacaaaggcagaggatcgtttgaggtcaggagttcgagatcagcctggccaacat

SEQ ID NO: 95090 - DNA, 73599 bp, Homo sapiens
aaataatgattcttgctgcagtttatacaaataatcaggccaagtttaataaagcaaattggtcttaccataatttgtctttagtaaaaatgggaaactggagacagagattatgtttcaataactatggtatacttgctattaaattctagtctcatcagttgtttttgcttctgcaatttaggccaaccctgcttattcctgtaaaccaaccagtgatctctggctgctgcttagaagaaacaagagggatggctaattaaacaggttgaagtaaaggagccagccyaaacccaccaaaaccaaaatggtgacgagagtgacatctggtcgtcctcactgctacactcccaccagcaccacgacagtttacaaattctatgacaatgtcaggaagttaccctatgtggtctaaaaagaggaggcatgaataatccaccccttgtttagcatatcatcaagaaataaccataaaaataggcaatctgcagcccccaggctgctctgtctatggagtagctgttctttttttcttttactttcttaataaacttcctttcactttgcactgcagactcgccctgaattctttcttgcatgagatccaagaaccctctcttggggtctgaattcagacccttgtcatgtaacaaccagagcacccccgggtttatatttagtgatcctttcattccctcatacaaatgctcattatgtaacaagtcagaaacagcttttctagtcttttatatgtggtataatcattatgacttaaatacacaatgtgggtgtcataaggcagaattttgtaggtgttttaacagatacataaaagggagaagtaaatttggactaggaaaatccagataagctccatgaagaagactgctggagagttaagctttgaaggatgagtgagggtgtaagaagcagacataggagacaggacattccaggtattggagggtcccaatgccatgtgaagtatgggaaagggactattaaatgtgttggatacttcaaaataatgttacatcttcatagctatgttatattctcttgacgtgtgttgcaagttgctggaatattttactgacaccctgtagctaagatttttttccagactcaaagataactagtgggctggccagtggtctaggaaataatcaggcaggtgatttcagcataatgagttaagtggatacagcccctggctgagggctattcttatgtgacactggcagagtttcagaactacttaggtgggcttaagcatttatttattatcttttatgttctaggcactattgtaggcagtggaaatgtggcaatagacaagctgtggctctgctttcctggcggtaacattccaatacataagagggacactaaaaaggtaaataaaaaatacactgattttagctgatctcatttcacagaggtcagcgcactctcccctctctgagagtgttactatgcttaataaacttttgctgctttgctgaaaaaaaaaagtgaatacattgatttcaaggtaactcacgttgtttcatgatatataaaaaataaaaacaggttgttgtgataagggaagtgatggatggaaatgcccctccagggaacaactttttagtaagatctaaataataggaagacacgtgaaaagaagccagtaggcagaaatcatgaggaagcaaaactaggcaatcagaaacagaagagaggtaaaaacaggtggagagaagacacagagaactcaactaaccagaagggctgttgggtttccagaactattgcttgaattttgacttctagggtccctgttggctcctgaatagatgcataagtagatgcatatgctccattttccatctttattctgttataatatattcctatctatctaacatctaatgatctattgatctaactgtccatccatccaatcattttcatattgtgggacagttaggttgctgccagtttttagcaacacaaggagcaagacagcagtgaacattcttgtacacactttatcaagtacatggtatgggatttttgcatgtacctggaattgaaactgctgggtggtaaaggatgtctacctttaacttgataaaaacctgcaaaattgttttccaaagtttttacaaataaatttacttctccacaagaaatgtacacttggcattatcagacttcaaaattttttccaatctaatggtgtgaaatggtatctcattattttaatttatattatcttaattattagacattacaattagggaggtatagtttcaaaagtttattggctatttgggtttccttttcttcaaactgctatttgtttgccagttattctactgggtggtttaactttcttatttattagtagtatcctgagtataaatactttttgatcatacacattgcaaatatctgatctttttatggcttgtcatttatcttcatggtatttttggtcatgaggtttcaaattttaatgttttcaaatttatcagtccttttccctcatagtgtgtgctttatgagtctgtttaggaatccttctttaacttgcaatcatagagatctgatcctatattttctgacttttttattaatttacatttattagctactactgcaaggcagtatgtggattgacaaaaatacaaatatgaactaaagtccatagtttatattaaggttcactctttgtattgcatagttccgtgagttttgaccaatttataatgtcatgtatccaccattataatatcatacagaatagtttcattgccctaaaaatctcctatgctccattcttcccttcttgtgacttggtccttcatttcttttcatcattcaataatgttccattttatggatgtagcagtttttattgtacattcacctattttcttggttgcttccaatttttgacagttatgaataaaggtgctagaaacattagtgtgcaagtttctgtgtggatgtaagttttcaagtcatctgggtagataccaaggaacatgattgctagattgtatggtaaggctatgtttaactctgtaagaatctgccagactgtcttccaaagtggctgtaccattttgcatcctaccagtgatgatagttcctcctcacatcttcatagcatttggctggttgtgttttggatttcagctgttccaatagatatgtgatggtatctcattgtttagatgttgaatatgttttcacatgcttttgtgccatctgtatatcttcttgatgagatatctgttccgatcatttgcccattttaaaattgggtttttctattgttaagtttaaggagttctctgtatagtttgaatagaagtcttctattgaatatgttttgcaaacattttttccagtctgtggcttgtctttacattatcttaactatcttttgcagagcaaaagtttttaattttaatgaagtacaacttaacagttttctttcatgggttgtgcttttggtgctgcatctgaaaagtatctgccaaacccagagtcacctagatgttctgttatgttgctttctaagaattgtatagttttgtgttttatatttatgtctatgatccattttaaattactttttgtgaaaggtgtaagatctgtgtctggattcttcttcttcttttttttttttttttttgcaagtgtatctccagttgttccagcaccatttattgaaaatttgaattgcctttttcctttgttaaatattaaatattagttgactatatttgtgtggatctatttctggactctattttgttccatagatctatttctctattcttttgagaatactacactgtactacactgtcttttttttttggttttgagacagagtctcactctattacccaggctgaagtgcagtagtgtgatcttggttcattgcaacctccgcctcccaggttcaagtgattctccggcctcagcctcccgagtagctgggattacaggtgcctgccaccacgcccagctgatttttatatttttagtagaaacagggtttcaccatgttggccaggctggtctcaaactactgaccccaagtgattcactcgccttggcttcaatactacactgtcttgattattggaacatatactatttttttttctttttttaggcaaggtctaattctgttgcccaagcttgagtgcagtaacttgatcatggctcactgcagcctcaatctcttgggctcaggcaatcctcctgtctcagcctcggagtagctgtgactacaggtgtgcaccaccacacctggctaattttttttttggagagatgaggtctcactgtgttgcccaggctggccttaaactcctgggctcaagcgaacctcctgcctcagcttcccaaagtgctgggattacaggcatgagccactgcacccagctatactgtcttcaagtctgtctgttttctcactttgtttttctttaatattgtattggctattctggctcttgtggctttgcatgtaaacattagaactggtttgctgatatccacaacataacttgaggtgattagaattgaatcagtagatcaggttgataagaactgatatttcttgcacatttttaaagttttgcttttaacatttaggtttctaatcttccccaaattaatttttatgcataataagagggagggatcaaaatttttttctcatacaaaaagcaattgtatcactacggttcattgatcagtctggactttctcactaatttttaatgctacttttgttatatacaaagttctcatatgtgtgtaggttttgttctgggactttattatgttctagtagtttatttgcccatacctaaaccaatatataatacatcctggtagggttggtcctcccaatatattccctgatcttacctgtccctatcctcctctccccaattacagcgcttttcttggaccttaagttttgatatgaatttcaatgtcattttaacaagttcagtaaaaaaacccttttgagattttaactggaattgcattatatgtactgattagttcagggaaaattgaggcctttacattaatcttttctcatttatgaatatggttcatttctccattaattttatccatggatcctgtacattttcggttacttttgttctcaggtacctaatagtttttttttcttttcttctacttgttaatggactcttatttaccattacaaactagtgcagtttgcaacataattttcaattaaattgttttacagttacatagttttaaaattcttaaaatgtcaactgcttaataaaaaatacaatttatacaaaaatacaagagatactatctgaaatgtgaaagtagtagtatatttatgatttctccccaaagtggaaggaacacacactctaatgtttcttgtagaaaattatgcctaaatctggcagggcgcggtggctcacgcctgtaatcccagcactttgcgaggccgaggtgggtggatcacctgaggtcaggagttcgagaccagcctggccaacatggtgaaacccatctctactaaagatacaaaaatttgctgggcgtggtggcacgcgccggtaatcccagctactcgagaggctgaagcaggagaatcccttaaacccgggaggcggaggttgcagtgggccaagatcgcgccattgcactccagcctgggcgacagagtgaggctccgtctcaaaaacaaaacaaaaaaaaacagaaacaaaaaacaaacaaaaaaaccactaaatttgaaaaatgttaaatcaacttctttgctgtattataaagctccatttccacccctctttttagtttaggaagtttaccgttatcggtgaagtaattattttgttaattacaaaggtaagtaggttctttctgaacaatcaggatgtaaacttaatgctagtgaagtaattaaacattttgaatgttaattaaactcagtccagttaagggttttatttactactaacaaacgtattcaccgtgtgctaagtgctgcagggaatcccagcccgttttcctccatctaaaaggaaaattaggaggtcccaatactttacttgtagattttccagtttctaccattccctgtaaggcactgagacgcaagatttcaaggcccactcggggtaccctggcatggacatcgagtcgttctagcgctgagcttcaaaactattcctttccttccctttcttcttcataccagactctaatctgttctccctagcttcgaattattcactgtatggtcgaacatcttactccacaaataacctctgaagtgttgcagttgtcttacccaaatacctgaactcagcttgtcccgagtactgcgatcccgcgtactgctaatgggaatatagttaacccaactagtatgaggtccccagtacacagcagctccaagatcaaggcgaccgagtaacactgcttgcctagactcaggccaagttcggagagtgatcctggggttattttagaacgtgtcccttgcttcccagaaaaattcagtcgttaactcaagtccagatgcccaatgaccattcggataaggtgagctaaagcttcaatgccttgaggggcttggcagggctcgggctcatcccggagaagcagccccgctttccagactagcagttcccrgggatgggtgtgtgctaatcgcaggccaacaagcccagcgcggtacagaggtcccattgtgaccggaggcgagaaaccccgcctcggcaccctgacgcagcgcaggacccgccccgcgcgtgacgccagcgtcaggccagccccggcatgctctgcggccgcccgcggtccagctccgacaacaggaattttctccgagagcgggccgggctcagttcagctgctgtccagacccggatcggcaacagtgccgcctccagacgttctcctgccgctcgcccgcccgtcccagcgcccccagccctcccgcgagggcgccccgggacggaaggatccaccagtctgtcggcgcccgccgttctcgtggtcgccgtcgccgtcgtcgtggtggtagtctccgccgtcgcctgggccatggccaattacatccacgtccctcccggctccccggaggtgcccaagctgaacgtcaccgttcaggatcaggaggagcatcgctgccgggagggggccctgagcctcctgcaacacctgcggcctcactgggacccccaggaggtgaccctgcaggtaacgcccacacctcagctctgggtctcttatgcccctcacgcggctctgggggtcctcaccacaatcgcctctgtcccacgatgaccgaggaggacctagggcaacatctycttaagtctattgggaagtgaccctgtatttcccctcacacctaggagggtcactcccccttcccgtsgcagttgctctttgagattgacctgaggcacattttctctttctagaagccgctgcgtaagtgacggacccatccacggggggagattcctgctgatagttgcccctcctcccactccccagtccacggtcactgcaaaatgaacctttccactccccttgcacggggtcctcgtctacctcctcccctcccaccagtaatgcagtcattaatcctctctgatctttccttcctctcccctccccctgcgatgtgctttcattgatgcctcacactgcgttttgtcttcccaaaccctagcgtactcaattcccaaagtaatgaccacgaccatgcatcgctaggtcggttcttaggcagcaccacacacattgttttgtttgagtcgatatttctgaattattaaagtcgtcttactgaaattaatacctgatactagaaggagcagtggcttgtgactgtttccttttcatgagacaccgtgttgatagagaaaaaattgggaggaaaaaaatccctgagactctaggagttttctaataagttggaagttatgatttccactacgtgattttttttgaatactaatctgtttttagctttagtttcaggaactagatacaaaaatagatctctttttctccttttcccttgcaaacaaaaaaaaacagtaattttcaagattgggatatttgggatttgttctaaatctgagcaataatgtaagaacattcatttgaattagccaaatcatctgcctcgttttgatgactaatttattcaccaatatttgttgatttatttgctaaattcttcgctaaactagccagccacccacacaaagatgaataaaacatgagcagtgcctagggcccagaacagttcctgacacttgggttttcatgtgttagtttcagttcttattacctagaagagtttttaagcagattattttaaaggacccgtatgttttggagaagaaacttgttagacaacaaattttgaaatttaagggagtatttgttagccgagaatataggaaatagtgaatccaaagtgatttttatgtcatttaaaaaatatatttcctttaaaggaaatgtgtcttccaaattgaaattcagtacttgtttagtttatcaatttgtttgtattttattatataagactctaaaatttattaagatgatttgttttctggcagtcacttatacataaaacattattaattaaaaagtgctacttcctggtaaactctagtgttggcagatcagttacttttaagcagtgactttaaagtttaaagctttgaagactggaatttcctttgatgtatttgtctgtagaatagtaataatagctactgtggggttagttaaattattttttttttatcttagtcgcccaaacaaccatattaggtaggcactatcattttaggtgaaactcagtgaagtaagccaggatgtaggtaaaaaagggcaaaatgtagtgacattaaactgtttttgcttgttggaaagtaactacgtgtgtttaaatcttggtttcttgtagcaacttttaacctaaagacctttgggtttataatccgaatttttaatatttgtaagtgcaggtaaatactaccatttatttttccctaagatgattattagttagaaatacattccctccatgtgcaagcaaagctttggtctagaagctgtcctaaaagcatctgctaagctgaattgatgattattcacctttcaactcagtagatctggctccttgcattctaggtcattgcaaacactactttcataatggttcagaatttctttagtaaatctcaaaggaaatattttcttttgagattttactgtatttcccttgaaatagataagaatcatacctcacatttcagaggaagtatgtattatatagtcgacagagtataatgtaattttagagcagtcgagtatcagtaatgtagcctgtttttttctcagtttttttctaacatttttgtatgtttaagatatactttaaatgtactttagaaacttactgtagtaatacttatctggtgattgattattcctgcaagctgaactatccagagcatatcagaaaataaaaagaaaaaaacaagctaaaaaagacttactagagtcaaaatgatagaaggcccagtctttgctcagaatttgtgggtacatggagtaaatatatctcattttagacagaattcctgttcttactagattaaaagaataaattataaaggagatggtgaggttttcggagtatagtagcagaataggcagagtaaatctaaaacaacaatacagccacagtgctttgtatttaataatcctttactgtttataaagcactttcacatgcattctcccaactatcctgtgaggtagatgtagacggtactgttaatatgtatcatatagttaatgaaactgaatttgccgtttacaaatggcagatctgagatgataaaccatcttatgaattattgttctatgaccaagagttttgtttgtatattatgatttaggcagggaaggtgcttctgtataaaattaatttcttaaaagctttggctcataaaaagattctgctttaaagttcccttgaacataaatttgcattacttttttcatatgtgacaccattttaggaaaaagggattacttaagctttccttcacgagttacttttgttgtgtaacaactgtttaacttatttgaagattttgatttttaatttttatacttttctttggagagtcatcgtataaaggaataaagaatcaagtcagatctcaggtccataataattctcaacggactcttaaaattgtttttcattttctgaagagctgatgaattagtgtttggaatattccagttatgttgtctcagggtctttctgtttgcagtattaagcaacgttgtttttctcactaacttgtcactatgaatttttccattacttgggacttatagtagataatggcaaaggcttcataggtaggaattaataccgtaattattatttaacattacaaaactaatatatttattcctttgttgggtctaaatgagattgcttgctatatggtaccttatagcaacttagcttttcaataacagtgtgttacagtgctcaagagcatggggtttgaacacagtgctagttttgagtccagattctatactttactagctttgttactctggtcaaatcattaaacttcctgtctcagtatcctgagctgtaaaattgatccagtagttgtccctacctcaatgggttattgtgagggtaaaataaatgctgtctttcatgataattattattgctgctgagcacctactatatattggatacttgaatcaaaaaacaaatatttgctctttgaaattcctagtccgatggggaagacaaataagaaaattataacaacgtaatgtttatggaatgaacattcaaatttagttcacatgcaaagattacccaagaagtttaaaaaatgtactgttctttctgctttactacaggtttttgcctgttattgaatgcatattttaaaaaatcttttcatcatttttttaagcatatgtattctatcatggaaattaatctttgtgttaggttgtgtagctacacagcagttttcatatccttcctctttctaacagtgttggaggtagttacctaaataatctattaaaaacctgtaactcctcttaatattgatagttgatattttatattggtctttgccttaaaggaagaagaaaaagccagatctatacaattgctgtgttaagttatgtctccactagtgttctgatataataattgattttcttttctgtttttaaaaagatgagtttgttcctttaagcagtagcttctgaaaagtcttaggtaagctaatgtagtaagttacggctaattttttaatatattaaaaaagtaaacaatatattagtttactttccctaagattataggaaatcttgagtcctgtagatacaaataaggagtcatggtttatattcagtgtaacttttaatgttagtgattacatccagttttctgtttcctattccctccctgtcttcagcattttagaataataaagtatataatgtttaatagacgcccatcaaaaacatgaaatatttgttaggctcccatgtattttattaagatgtgactatgaagacaggagcctaaagtgctagtttgttttcctgtataatagccatgtaacttggactacacaaactgcgtcacatctttttggggactgagcataatgtggaaagaggatggtttttgaatattatttccagccatttataacctttggcaagttttaaagtctctataaaatggtattaccttggaaagtagtcatgagaattcaatgaaatacctacaattacgcatcgcatgttttggtactacgttcttccacctctcatttccaattctcccatcccaactgagagaattgtgagctcctaaaattcagtaattctgacatgtgttttttgtactagctgtaatgctagttttcagtaagagtccttgtacaactaactgtagcacaaggtaggcatagaagaacgtaggacagaaggcttcatagaggtrggggtacctgagctaagctttgaagggtagatgagatcagattgaaaagggaaacatttctgagcaaggaaaactatctcacaaaggcaatgaagctagactttgagtagcttactcatcatttaggacatcatgggaagccactggatatttttctttttgtattttattttattttattttattttttttgagacagagtctcgctgtagcccaggctggagtgcagtggtgtgatctcagctcactgcaacctccgtttcccaggttcaagtgattctcgtgcctcagccacccaagtagcttggattacagatgtgcgccaccatgctcagctaatttttgtatttttagtagagtcggggtttcaccatgttggccaggctggtctcgaatgcctgacctcaagtgatccacccacctcggcctcccaaaatactgggattacaggcatgagccaccgcacctggcctggatatttttaagcaggtaaattatatcatgtattagagaagtgacaggcaacaatgtagagaagggttgtttgagggaaatgttttaaattgggaaataatgatcactcaggacattggttttgaaactagtggttaccatacattaataggatgccaaatcaatatagtgtcttgagaccattacagtttaaaaagatgagttagaataagttatggtagaggttacatcagacagagccttgcaagtagtaaggtaagtactcttttttttttttttgagatggagtttcgctcttgttgcccaggctggagtgcaatggcgtgatctcggctcaccgcaacctctgcctcccaggttcaagcgattctcctgcctcagcctccagagtagctgggattacaggcgcctgccaccacgcctggctaatttttgtgtttttagtagagacggggtttcttcatgttggtcaggctggtctcaaactcccgacctcaggtgatccaccttcctcaacctcccaaagtgctgggattacaggtgtgagccactgcgcccggtggtaagtattcttttgtgaagtgtgctttagttttatgtaaaagtgtctatgtacatattatatcaaatgataaatatatttcttcctgtgtattgcatttaaaaagtttgagaaaataatttgagagagactgttgtgttagtccagacaagaggtgctggggcccagattaggacagatgagatggaaataaggtacagatttcacatttcagaaaataaatgtgcaggacttgtcaattgattacaggttagggaagaaagaagattaaggtgttttttgtaggggaaggagtggatgacaaagatagggaagtagtagaagacctttaagaaatcagaggttctatttctctttattttgktttctaaggagttattttactctttgatataccagattggctataaatacatttttaacattcttttaaaaattgtgaaaaacagcaaacatatagaaaaatggatgaatcataaattgttgtaaaacatatacccaccccaacccaggaaaagaaaattaatttccagcaaccaagtgtcttcattttccttcatagtcttgatctctccctccctctagtggtaatcttaatagcagattttttttttttctaattaacaaaatagaatgttttgaattaattctgttttgaaaataagtactctgagaaaataataagtgcatgaaggtctttgtacaggaaaccgtatgaacatgaaataatttagttttactaaaaggttgtaccacaatattatattaaaactgaataggagaaaaaaatcaatttcctatcatcaatattctattcacaaccgttttatttttattaccttctacttctcctaaacatattttacatagttgcaatcatacgtataattttatattctttttttcactagccctttataaacattttcccatgtttgaatggtattgactataatttttgatagtcacaaacctaatatttgatgatcatgttaaacataatgtgacttagttattatttattattttttwaatttttacttttttttttaagagatggggtctcatactgttatccaggctagagtgcagtgatgctatcatagctcactgcagccttgtactcctgagctcacgcgatcccttctacatcagcgtccagagtacctgagactaaaggtgcatgcctgcctaatttttaaattttttgtagtgatgtggtcttgctgtgttaccaggctggtcttaaactcctggcttcaagtgatcctcttgcctcagcctcccaaagtgctgggattacaggtgtgagccactgtgccttgtatcagtgttttgcctctttttgaattttatttaatggcatcatatgaaatatgtgtttttttaaaattttggtttggcgtatgcccagattttgagagatttattcatgtgtatatagttgtagttcttttccatgaccgactagcattccattttaagaatatacctcaatttatatgtctcctactgttaatggacacctaggttgttttcatgttttggctatcacaaattatgcttcttacaattatactttttttgaacacgaatatccatttctgttaagtggatacctagaagtagaatttctgagtcatctagttgtgtattttcagctttgttagacactttcagttttctgaagtgattgtcccggtttatattcctaacagcattatgtgagagtttcacttatggtatatctttaccaataattgctattgtctgtctttatttttttctttcaccacgttggccaggctggtcttgaactcctggcctcaagcaatccacctgccttggcctcccaaagtgctgggattacaggcgcaagccaccgcacccggcctgttcttttcttttggtctgttttgtccgttactgtagcagtaccactctgtgtggattactctcaatcattgctacaggacttggtatttgatgtagttattataggctttggtgtaggactccagctttgttcgtttttaagattgccgtgactattcttgactttttaagttgccatataagttgtagactcaattttgggattcccacaaaagaaactggataggattttgattatattttgtggaatcagtagataaatttggggagaagtgaattcttttaacaatattgaatcttaaaataaatttttaatttctctcaaacttttgaagttttcactgtggagatctcacgtgttttatttgatttatccctaggtgttgacgctttttgatattattgtaaagggtatcatttaaaaaattactttattgttggtatataggattataattaattgctttatactgaatttttttcacacactctaaaggtttttatgtagattattttgtattttctctatgtataatctgaaaataatacatattgctgtctccccttctgtctttttgtcttactgcactagtaaggacctctctaacacacttgaaaaagaagataaaaggtgatagtggtcatttttatttcccagtcttaaggagaacattttcaataatttattgttaggtatgatatatgctatagattttctttaatgactctaccagattaagcaagtttctttttattyttagtttgttaagtattttcatcatgaatgatgaatttggccaaatgttttttytgcatttcatgatgattataagatttttyttaatttttctcttattgaggtgaattactttgattgaaaaaaaatttgaatgctaagtaacctttgcattcctggagaaaaccctatttggttgtatatagtctcttttttattactgtatcaattgctaatattttgattaggatttttgcagctctgcttatgaaagagattggtttgtaattttcctttcttatagtgtccttgacaagttttggtaccaagttcagaggtgtttcttctttttctatttttggaagagttgcttttaataatacatgtttaaggtctgtagtgaagttcatttctttatcatttgtgttgctttattgtcttcatacattttgctaagaagttatcaactgtattaatcttttcaaagaacaatttttgtttgttttgaggctgggtctcactctgttgcccaggattgagtgcagtggtgcgatcatggcccactacagcctcgaccatgtgctcgccccatgcccggctaatttttgtatttatttatttatttatttgtacagatgggatttcatcatgttgcccaggctggtcttgaactcctgagttcaagtaatctgctcaccttggcctcccaaagtgttgggattacaggcataagccatcacatctggcccaaataataatttttgactgttgagtttttctattttattgatagttttgtccttcattatttccttcctaatcgttttttgaaggttgattggctgttatttttctagcttcttgagctggaagcactaattttttgccttttaaatttctattattcattacatgtctttgtaagtacccacaagtcttgacatgtgttggaaaaggcggtctcatgcacacagcctttccaccccttctcaccaaataaaaatgggccttgggcctgaaacactttcttaccaagcgatagagtcctcacagcctgtgctggacctgtcactctgtgtgaaatatttttccctgttttacactcagtgtgtcctcctttgctctgcttcagtatgtgtgtcatatgtcacctggctcaccttcagtatctccccattgggaaggggatggagggacagggttggtctgctgtagcccaagaagggtgtgtgtagaccagttgttggcatcagctgctgggaggaacttgctcaccatgggataccaacacctattactgaagctgatcttgctttgtctcctctctgtgtaagtaaagcgttgttccatgcagtgcttgactgtgcatcgtgttttctttggtgactatgataccaagatacaatgaacagaagttctaagacttctactcctgatattaggtgacagataccacttgcttgacaatatgtgtttattatcattcagttcaaaatgttttctaattgccattgtggtggttttttctttatctcactcattttacatatgtatttgattcatttccaatgagttgatgcatatttaattttttaaaaaaattgttataaaaacataaaaatttattatcttaaccggttttatttggtgtgtgtgttattgctatctagctcatatccactgtagtttgagatgatactctaagtgattttcatcctttgatatttgttgaggcttgctttataatgaagcccatagtcaattttggtaatgttttgtgtagtcttgaaaagaatgtatgttcttggccaggcacagcccagcactttgggagcctgaggtgggcagactgtttgattccaggaattcaagattagtctggccaaccctgtctctacaaaaaaaatgcaaaaagttagtggtgatgcatgccttagtcccagctactcgggtggctgaggtgggaggattgcttcagcctgggaggttgaggctgcagtgagctgtgattgtgtcactgcactgcagcctgggtgaacagagtgggaccctctctcaaaaaaaggtaagaaaaagaatattctgttgttgagtgtagtgttctgtgtatgtcagttaagttgaatttttaattttgttgtttagagctcttactacataatgatttttctctgctaaaaaaaaatgaggtcttggaaaaaaatagtgtcatctataagcattaaaaaaattaaaaatgaggtcctgaatggtgtgctcaaatttccaacatttattatgggatttgtttaattctgtaagtttttgctctatatcttttgaagctgtattgttggatacatgcacatttagaatttttatatcttcttggtggatcaatcccttagtcattataaaatgtccctccttatctttagtaatatttcattaaggtctattttatttgatatgagatagctacctcagcttccttctctatgtcttttgtaagcagcatatagagttgtcctttcatatccatgacttctgcatccatggattcaagcaactgcagattgaaaatattaagagaaaaaaaagatggttgtttctgtactgaacatgtgcagatattttttcttgtcattattccttaatacagtataacaactatttacataacatctacattgtattaggtattagaagtaatctagtgatgatttaaagtatatggcagaatataaataggttatgtgcaaatactacatcattctatacaacaggctttcagaacgtgtaaaataatatgaacaaaaaaatttaaatcaaaatataacaggcttgagcatttgtagattttggcattgttgcgggggtgggatcctgcaccgaatccccctcggataccaaggggatacagtgggaccatttgcagatcctctagagtgctctctcctgtctgtctccctgtctttccgctttaatactctgtcctgcatactctagctgttttgatatcctccgatgctcagtttatctcaattaatgaagtccacacaagctccatctggattctctttccctttgctgggacctgagaattctctcaagacattaagccggggcagtcatagagttcacgttgtttgtttcccatctctcagggatcactgttctctctaaagtccattgtcttaaaaattgtcatttcatatgttttgtctggtttttatttgtgggagaggggttgtttcaagtaaaagggtaaaatcctgtccccattactttgccttggccaagagtgaaagtggcccattagatgatttttatcagtgattttcaaccttttctacagggttagaattctttgttcaagtaaaatcttatccccaagtgtcatgtgtatgtgaaataaatgagggcaagatggtggtagtgtagtatatgtgcacatgtgcctttgtatgtgttggggatatagcagagcttttttgctgacttggattcctrttcccattccttgagggctttatagcccaatttgaaagtcactaatatagagagtacaaataggtatataaaaaagtaagcaaatgagaaaataagccagttattagttacagaggaaacaaactatccaggaaaggaaatttacagtatatctcattttggggtttggaaggatgtgtacaaaatagtgtaattgaaaattgataaaataaaaaatcttatatacttatattgggtaaaggaagataggagaagtgacagagcgagagagagagagtgtttatgtgtgaaggaaataagaaagctcagtcttataagaagtctcagataatgtgtagactttacagaaaagcagtttaagaatggtatttaaaaataaggaattaaataacatgagagttgaaaggtagtttagggggaggtctattgttgattgataaaaataaaaattacaaaaaaaaagcatatggtaggtttggaagtggaaataattgaatacaaaattctcttgcaagaaatttggcagagaagggaaggagaaagaagttggcctctaraagtgggtgggatacatggccacataatctgtttttccatctcaaaacacttggaccttttaacttttttccccctttttaacctgtctttaaggtggggttttttttttttttgagacggagtctcactttgtctcccaggctggagtgcagtggagcgatcttggctcaccgcaacctttgcctccagggtttaaatgattctcctgcctcagcckccctagtagctggaattacaggcatgaaacaccacacccagctaatttttgtatttttagtagagacagtgtttcaccatattgaccaggctggtctcgaactcctgacctcaagtgatccacctgcttcggcctcccamagtgctgggatcacaggcatgagccatcacgcttggcctgtctttaagttttatcatttatttgttttggaatctgctagcaagtgaatcttacatacttgtgctatattatattatataattctctaatagaggctctaggatttctcattgatgcttttatgttttgtaattctctaatagaagctctagagttcctcacttatgctttgattagttgtatcatgcaagttaaaaattataattttgtaacatacccaaattgagagaataaaatattcatatattatccagaatccgtatttgcttcattttttaacccctttaaagtattttaaagcaaatctcagtcagaccttgtctttgtctttgtgtatttcagtataaatttgtaaacataaaaagttattttttttgcgtgatcacagcaccattagaacactgagcaaaattagcagtaatgtctaagtactgtttaatagtcagttcataataaaattttacctcaaaaagtatttttatacgtatttgtttgagttaggaaacaaactagatccatgcgtttgtatgtttcataagcctctttaaactagactgtatgctattgactatttattggtggggcgtttgtgtagaaagacctacattctggatttgtatattttttgttgttcttctttgtggtgttttttaatttttaattaattaatttatttttttagagaagtggggttttaccacgttggccagggttgtcttgaactcctgaccccaagtgatcctcctggctcccaaagggttgggattataggcatgagccaccatggccagccatgtggtgtttctttaacccctatattttcttaagaataggaagatctggccgggcgctgtggctcacacatgtaatcctagcactttgggaggccgaggcgggtggatcacctgagatcaggagctctagaccagcctggccaacatggcgaaaccccatctctactaaaaatacaaaaattagccagacatagtggcaggcacctgtaatcccagctacttgggaggctgaggcaggagagtcacttgaacctggggggcggaggttgcagtgagccgagatcgtgccacttcactccaacctgggcaaaagactgagactctcaaaaaaaaaaagaggaagatctrgaaccttgattagatttcaaatcataggtagtgcagtgtatttcatattgcatcacatcagaaggtataacatgtcaggttgtttcgtgaaatcaggaggtgacagatgactcctaccattataaaattacctatcaatctttcatctaatggttttattcattgaagattgtttcctgaatactttttctgttgtatcctccacatttgtcaacgggaattctttggtagataactttctctcattaattagatcggtttggatattatgaaatacagtttgtagaaaatgtaggataaatgcttaattctattttaattgccaattttcagagtaacagtgataacttcatcaatattaagcaattaaaaagtagacccttgggttgttggaatttgttaaagggtaagtttaaattgtatttttaaccaatatagatgttgtttttaaaaattatgtgatgaggtaaggcagagaacaaattgagaatccattattaatttccctagtatttaaaagctgttaatatttaaactaaagattagaagtgattagtagctaaatttactagcttagtagtatacattttagggattaaagtttaacaggatataattcgtcatgcaaaaccaaacgcatatagggtagtactaacttgagagagtaacgttgaatggcatttctaactaaattgaaagcctttttttttttttttttaagatgtgaaagagaatttgcccagaaatgatatttaacatttagctatttggatttaagctacttttagagacatattgaaattgttgtttttaaatattgttttaacatatattttagtcttaattattattttataatttcatcattactttgctgttttttattgaaatttaaatgtatcattggctacatttacgagcttacggtgtgccaagcactgttctaagtacttttatgtgtatcaacttactaatcttcagaacaatgcaagaagtaggttctaatgtactgattttatatatgagatagagagacacagagggttggtgacttgcctaaggttactcggtttgtatgtagcagagctgggattcaaactcaaactctggctctgtagctcatcctgtcagctactactatctgaaatacttgacaaatagtgcaggataaaccccattaaaaggagctcactaagatttatattttgtctcaactctactgaggtggaattttatatttctagtatatatttaatatagtatatatagctagagtgtgtatagtgtattttaatagtatattttagatgattcagcacattgagttacttgtggtttatgtatgaggtgggaacaatgcaaaggtaagaagtattacctgtacatctttaaactgaagtcattgttctccagccagagaccagtagaaactcacctgtagctgaagaagttgggtttattactcactgcagtaagggagaactacattgagaatggtggggatttgtctggtgatttgggggagggttcgaggtaacggtattctctggattggatggtgtcaggaaggaggtgggacaaatctatgacttatgggcatcttaatcgtacctagaacgctgaagaaatgaagcaggcccaaagtttgactggaaaagagcagcagtcactcatattagccaggataaggaggtatttggtaatttttgtcatttggacaaagttcctatttttttctaccttcagacatgattacagagtggttttgttgttttcttgacccattatgatcacagagtaaccctatctaatgttgaatgttgatgttctgtaaaacagtttatgttcagcatgacttcaaggcctagtgagtgccaggccgttgttttgctactaatttttccactagtaaaccaggttcattgctgtaaaactacaagttagtaaacatacctaagtcaaaagaaaaaaggttaaattacttatggagaaacaagaaaataaagaaacaagatttaaactacctagtatctttgtagacaaataaatatttatacataaaatattttgataaatgcgagattatattattcacatatctttttattctagcggtttctttccagttatgtagctgttgtgcaatacagaaagttagggctagtgtcattggagttgtgacactgtgtcttcttcataaatgtttaattagtgttcagtaatttgtattgagtaatcatatctgtctctagcccttaaatgcacacatctttttatgtttgtacaaataaatgtataatatagcatggtcaatttagggataataagagaatgcaatttttataagctagatgaagacattaatgttggtagctatacgagttctagtgtttaagtattaagtacctactgtttgctgtgaagattcagaaaatggagatgatgatttctggagtttgaggagcctagagtttctttcattataagcatttcagaatgttaaaaggtttctcaatctttattaccgtatttgaaatattttatctatgacatatgaagaagttacagaacagcatgtgtgaattgatagtggcattgtgataagaaataacatgtttttcaatgcagattttaataaaattatgattatgataaaaaatagtcattttaagtatatattcttcctgacagtgtctttcatacagtctttttgaaatctaggtggaaggcaacactagtatgcacatttttaaaaaatggggatattcaaaataagtccctttatactagttcatgaagttttactgcattatgtgaataaaggtaacagctaagccctatatataataaaaaccattatataaacactggttagttgtatattattaatagttttagtaaatactttcacatcttttttcatatgtcatttaatatcatatcaatctaattgagatagaaatatttaccctctttcttaagcattagttaaatgtatatacatacttttaaaacttctgttctttttttctattcttgccccattgacatgaaaaaaatgtkctgaattcttgctttcgcttttctcttttcttcctttgttccacttgggagccttcaaaagttctgaattataatagaagtgaagtgttagttctagtgtcagattaatacagaggaaaatgaaaattacaatttttaatagacttttataactagtattgctaattacctgtttccttttgaaatacaccgtctgtgctcaaatctaaaaaaggatttgaagtacttgacttaaaggtcttgacaagccccaaaagtcttatttaaaaaataccatagaaatctctacttacctcttttttcttcctgtaaggttgcgtttttgtttgtagccatagtggttaaattataatagtcaaaactgttatactctgagtgtataacacaatgtttaatgcatgttttgttagataatctttaaaattaatatataaaattgagtttttagtaagttggagatttgccataatgtaaattatggtagattatatttgtatatttattaacaaatctatgaatgttgttaaggacttctataagtaatgaaccatactaggaatagggcagtgttcccattctcagagactttccaatctgttggacataggagagattccctgtaygtgtacattccctgtatgtgtacacacacacatacacacaaatgtgcaaagattgtgatacaaggcagactgtgagaaatggcaggtatcaagaaagttatatagaaatattgaagacagaatgtataattaacactttggatcaaggaaggcatgttatatgaattaagggcaacatgttaacattagtggttctctttgtttaaatatagaattaaaattatagatgttagataaaattgtattcaaagatggttcttttatgtgaagaagttggtgttttctttaattagtatttaactcatgattttcaatttatctcctgttctctaaagatagataattgctttttttcccatttttaaaaaaaatttttggcagctcttcacagatggaatcacaaataaacttattggctgttacgtgggaaacaccatggaggatgtagtcctggtgagaatttatggcaataagactgagttattagtcgatcgagatgaggaagtaaagagttttcgagtgttgcaggctcatgggtgtgcaccacaactctactgtaccttcaataatggactatgctatgaatttatacaaggagaagcactggatccaaagcatgtctgcaacccagccattttcaggtacattttcttttctgaatttttccttttgaaaaatatgggcatttaagtgcattaaggaaatattttttaaaattgtctttgtttgagcaactatttggttaacttagaaactttctttagctagggtttttgtttttgttcttgttttccctaaaaagatagaagtaaatttctttatatttgcagtttatcatcgttgactctttgcaaaggaaaaactacaagatgttttggattaaccggctgcagagggtcaaggcttctgcttagttttttctagttagtgtttgagttgaagtgttatacatttcttactgccgattgcttattacttaattgttcatgttttcagagttcttgcctattaaaattttattaatttggttaacaattctttgttctttacgttgttcattatttaatttaatatattatgttttctataaagaataatgtcatatatgcttgatcatttttccaaaattgccagctttaaaaattctctttctgctcttgaaaactctagaaaatggtctggatttgaaaacagcattcataggttagaccagcagttygcaaccattttggtctcaagacctctttatagctctttgggctctttgttttaatatttgattaatgtttatcaatatttaccatattagatattaaaacaaattttttagaatacaagaatatcaagtacatgtcctgttagctatcattgtgatgaaattatcacatatcatataacctcttgaaaggtacactgtacacttgtgaaagagtgagaatgagaaaggtaaataacgtcttgtgaaaatagtttcaactttacaaagctcctgaaaggatttcggatggcccggggctccctggatcataggttaagaattgctaagttaatacactgacaaaaatggaatgtaccagtaacacttatctattgtaaacctgtatcaaataatatattaaaatattttgtcatagaaatctgttcaaaccctagtttttagccatcacatatattttcttcttttacatgagtctagtctttagatgtattaaaagattctgattaatacatttgtgtttactgtgtgtcaattgttttgtggtctttaggcttgcatgtatttataaatcctcaatcttgttcacaatggttgacaaatacctatataacagcattaaaaattaatagatgcatagattggatccccccaaagctggttttgtatatatacaaaaacatatttcatgaagttcctagagaagggccacatgagtttccttgtaactaaagcagagagtaaaacatgattgatctatttcagtaacctcaaatagaaacagtaaaataattatagtttttgatcaagaacagtgaaggtttgtcaaggctgactttggtatttgatacaatgttataaacatgttttcagtaaaaatatccttttctatactttttggttagatctacttacttattatttctttcccaaatgccaaagcctttgtttattttttctctacttagatctttttaaaaatatattttttattgatatatcatagttgtacatatttttgtggtacatgtgatattttgatacatgtatacactgtataatgatcaagttagagtaattggtgtatctatcatctcagacatttttttttgggttgggacattacagttcttcttttctagctattttgaaatatacaataaattattgttaactataatttccttgctgtattattgaatgctagaacttattcctctgatttaactgtacgttcatacccattaaccaacttcttttcatcaccccccttcctagatttactcagaatatgtataagtgatactaatgtaggcatatacacatttcataaaaagaatatactgtgttagaaaccaaacatcaatactctgaattctttgacagctggcttgtaataagtgatacattgaattgccccacagttttgcagaggagaagcagagtggaggccgagaaagtaagcaaaagaagatgacactgaagaaccctgtatgataggatattgttagttggcattatgaatagtaacatttgctatttaatttgtttcgctgttaaatttatttcagactgtattctaattcctatggcatttcttattgttaagcaggtcttagtcactataaaacagaaaatatgaaaagaaaagctaagggagggaaaggcaagttttgattaacaaaacgtctgagttacacatgattttaaataggagtgtggttttatttttttcaaatatgtacggtgaaatacttctaaaataccaagtaagcagatcagtagaccatggtctggagccccaagaagaggttaaagatgtaaatttgggatgatgtgcttatttagccccttttaaatgaattttatattctgtggttaaaaagaatctttgatttgttaatttaatagggacttactgacaatttggggttagttgtcacattttgattaatccttatgagctttaatgtttgaatataataataaacttttaagacactattgattgttaggtcagcctaataatatgcatgcagtgatctggactgattgatcagtaaatgttgatgagcgctttagatcaaagtccacagtactttcttgaattggctcattcaaccatagctgtatgcttatattatgattatgacgaaggtatctcatttgaatgtaaaaggcttatgtttatgtttggactagtctgggggaggaagaagaatctaaactgtccttgctgtcttagtaatttacagtttgtgacacagtaaccttgagggaaaaataacctaaatattgtacaaagaagaacagaaaaggctttcagagaaagtacaggtagttgattttgggcatacataggaaattagtatgtttcactgtgatcacatttgaactgaactttgaaggacaaggtagcctgtaggaggtgaggaatggtataggtaaagacaatgagctatagtgcctgacgggtaattccacttatggaaatttatcattctctgttttatttgagcttttttgtagcaatcagttattacggacaccttcagaaaattttttaaaattcaaaagtgtttagaaattttttcaaatttcttatcagatatttcttagaaatttgcctcttgtcaagaacctggctgaagtttaatgacaaaccatccagtaacagacataatggaagaaatgcagtttcaaatcaattgttgcaagtttatcaaagagcatactgagggtaccgtagtggaactggcaccttgtgggttgtgtgcatgtacagttggtagtgttttcttttggaaatcaaaaggacaatatataataactcaaaagaaagttatatgctgtatttctggcagcaacaattaaaagtctcttatattcagatataactaaggtacctcaacacaaaggagaattatgctactgttgaaatgtaactttttgactattgtctaatacatgcaaaatggctgatgcagggcaacaggaaaaaatcagcttaaaaaatagcttaactgtggctacaattaggcagtaatttgctcatgcaaaaactcaaaggggatatataaaaatgaaatactatgggatggtaagattaaagattatttttcgtttcaaaatatttttgttattgttagaatacatttaattttttaaaagctttcaagagaagtaacaattagtgttagtgaatatttgaggaattctctgaagccttgagggtttgaaacatttggctttaacgagtatggaattttaaagcagcgtttgacttgatgttactgtagtaaaacctcgcttactgagacaaggtaggagaaggaccaatatatgatagtgaaaatcagatatcttttaaatgatttttaattaccttcttatatatacaaaacataaattaatgattattaaataatgctaagttatctgaatgaagagattttccttttaaagattttagttttttagtgcatttttgattcacagcaaaactgaggggaaggtacagagatttcccagatcccctccttcctccacagacaacctcccccattatcaatatcagagtggtacttttgttataatacataaacctatattgatgcaccattatcacccaaagtccacagtttacattagcgtacactcttggtgatgtacattctgtgggtttgggcaaatatataatgcatgtatccactgttagtagtatcatacagaggagtttcactgctctaaraaaatcctctgtgctctgcctattcatccctcttttccccttaaccagtggcaaccactgatctttttactgcttccacagttttgcctttttcagaatgtcatatatttggagtcatttaattaagtagcctcattagattggcttctttgacttagtaatatgcatttgtttcttccatgtctttttatggcttattggcagatttctttttagggttctgaataatgtttcattggatatgcaccaaatctattttgttcattcaactactgaaggacattttggttgcttccaagttttagcaattatgaattaagctgctataagaatccctgtgcaaattttaatgtagacatacaaatttttaactcctttgggtaaatgctgacgagcatgattgctggattgtatggtaagagtatatttagttttgtaataaaccgccgaactgtttcccagaatggctgtgctattttacatttccactagcaatgaatgagagttgctgttgctccacatcctcaccagcattgggtgttataagtgttttggattttggccattctaatagatatatagtggtatcttactgtttttgtttgcatttccctgatatgtgatatggaatatcttttcatatgcttatttactcatctgtgtatctttgatgaaatgtctgataaggtatttggtccatttttaaattgggttgtttgtgttcttattgctgaattttaagagctatttgtgtattttggataataatccattattggatatgggttttgcaaatattttcttccaatctgtgctttatctttttattctcttgacagtgtcttttgcagagtagaaagttttaattttaatgaagtccagcttatctgttcttcctttcatggatcatgcctttggtgtcatttttaaaaagtcattgccaaatccagggtcatctacattttctcctatgttatcttctcatggaattttagttttggattttacatttaggtctgtaatccattttgacagaattttaatgaagagtgtaaggtctatgtctagattcatgtttttgcacgtgaaggtccagttgttcagcacaatttattgaaaagtctatcttttctccattatatttcctatgctccttttcaaaaatcagttgactgtatttatatgggtctgtttctgggttctctattctgtttcttcatctgtttgtctaatcttttgcagatatcacactaccttaattgctatagctttatggtaagtcttgaaatcaggtagtgttagtcctccaacttgttcttgtctttcaatattgtgttggctattctgggccttttgcttctccttataaactttagtttttacattttaaaatggactttttaagaatttatttttaattgacaaataataattgtgtatatttgggatacagtatacatgtaaactttagaatcagtttttcaatatcacaaaataacttgctgggattttgataggaattgcactgaatctgtatatcaaattgggaagaactgacatcttggcagtattgagtctttttatccgtgaacatggaatatctcttatttagttatttggtttcttttatcagagttttatagtcttcctcatataaatcttgtacatagtttgttagatttatacctaagtattgtatttttgggggtgttactgtaaaaggagtgcattttattttcaattttcacatattcattactggtatgtaggaaagcaattgactttcatatttttttaatcctgcaagcttgctataattgctcattccgcgaggtttttttggtccattcttttggattttctccatagaaaatcatgttatctatgaacaaagacagttttttttttttcttacctcttattttttttcttgtcttaatgtgttagctaggactttcagtacagtgttaaaaaggattggtgaaaagtgatgttctttctttattcctgatcttagtgggaaatcttcaaattacgtgtcattaagtaggatgttagctgtagttttttttgtagatattctttatcagattgaagatactctctctttattcctagtttgctgagtttttatgataatgagtgctagattttgcaaaatgctttttctgcacatgtcgataggttcatgtgatttttcttttttagtctgttaatgtattggattacattaatgaattttcaaatattgaaccagccttgtatacctgagataatcccacttggtcacagtgtataatttctttttatatattgttggatttgatttgcttgtgttttgtgtcagcaaatatattatataaaaaataaacatttaaaaataatcttttaaataaataggaaatataaaaatgtagcattttctgttgtatataatatttgctagcagaaaacaattgaggtatacttgattaaagtgtttttaagaattctttttcaatgagcattttatttagttaataaaaatttgatttgtttatagttgttctgaaaaaatttgattatggtaaatgctacataaaatttaccattgaagcagcatttttatctggggtaatacctgaggttggttgttccacaactacagaaaactaggatacagacaaccagagtgaggttaagagtggaagtttaataggcaaaagaaagagaagagctctctgtgcagagaggggtcccagagaaaatgggttgccagttctgtggtgtaatgtacagggttttatagattaacttgaggaggcagtgtttgatttgcagagggcacggaagattggtcggaccaggcgtgccttttgcataaagcatgtagaagctggtggccccactttaatcttttattatgcagatggttctctacttggccagtgccatgttgcctgcctcttttactagacacatggtgacaaagaaaagggaagatgaaggctccgttgtgaacatacctgacttccaggtagcccttttctactggcacagctgctggcattcactcatgcaagcttctagcttgcttatctatgtctgcagcttgaattttcaggctgctctttgttagaagtgatttgggggctgctttctattaaaagggagtccttaccgagaactcctttaccctcactatctgcctaaatcatttctttctggctccagttgtcaccatcttaaccattttttaaaaartacagctcaatagtgttattgcattcacatggttgtgcaactaatttcctaacatattttttttttataatgtaaaactacaattctatcccttttttttttttttttttttgagacagagtctcgccatgtcgcccagcctggtgtgcagtggtgcctcccaggttcaagtgcaatctctgcctcccaggttcaagtgattctcctgcatcagcctctcgagtagctgggactataggtgcccaccacctcgccctgccgagttttgtattttttagtagagacgggtttcaccatgttggccaggctggtctcgaactccagacctcaggtgatctgcccacctcggcctcccaaaatgctgggattacaggcgtgagccaccacgcctggccaattctatgctttttaaacarcaaatcttctttccttcctccagcccctggcaaccgtcatctactttctatccctaggaatttgactacttaggtacatcatgttagtggaatcatgtaatgtttgtctttttgtgactggcttatttcacttagcatgaacacttcaaggttcatttatgttgtatagcatgtgtcagaattttcwttttctttcaaggcttaataatattcctttgtatttatatactacgttttgtttattcatccatggatgtatacttgggcaatagtcacttttggctattgtgaataatgttgctgtgaacatggatatgtaaatatgtttttgataccctgctttcagttctttcgggtgaatgcccagaagtggaattgctagatcataatggtaattctggttttaattatttgaggaaccaccatactgttttctgtaatagctgcaccattttatattcccatcaacagtgcacaagggcaccagtttctttacattcttaccaatagttattttatttttgtagtaaccattctaatggatatgaggtggtatcacattgtgcttttgatttgcgtttgcctaatgagtagtaatgttgaacatatgcttattgaccatttgtttactttttctagagaaacacctattcaagtcctttgcctattttctcatggggttgtaatttttgttgttgagttgtgggagtttgttatatgttctgaatattaactccttgttaaatatatgatttccaaatattttatctcattctgcaggtttctttttcagtctgttgattgtgtcctttggtgcgtagtttttaattttgatgcggtagagtttatttttacttttgttgcctgtgcttttggtgtcatatccaagaaatcattgccaagtatccagtgtgatgaaggtttccccctatgttttctcatgagagttttaatagttttagttcttacatttagatctttggtccatcttgagttagttttcatatatggtgtaaggaaagggtccagcttcattcttttggatgtggatatctagttttcccagtacattttgttgtcctttcctcattgttcttcttttcccgttgttgtcctttcctcatttaaggttcttggcacccttgttgaatactgtttgtataattgtgggtttgtttttgggttctctgctctattccatttatctgtatgtttttctttgtgacagcaccataatgttttgattacagtggctttgtgtaataagttttgaaatcaggaagtgaaagacttccaactttactcttctttttcaatgttattttagctactcgggtcccttgagagtccatgaattttaggatagctttttctttttctgcaaaaattgcctttgggattttggtagggattgcactgaatctgtggatcacttttggtggtattgacatattaacaatattgttttccaatccatgaacatggggtgtctttctgtttatttgtgtatttaatttttttcagcagtgttttattattttcagtttacaagtctttcacctcctcaattacggttattcctgagtatttatttcttttcgatgctatcgtaaatggaattgttttcttaatttcctttctagattgttcattgttagtgtaaaagtgcaactgatttttgcgtattgattttctgttctgcaactgctgaatttgatttttagtaaaaactgtaaattttcttaaaatcattctttacaaatttcatgctttgttcagtccttatttataaaaaattttagatgagtatggaacttgtgattaggccatagttaattttttaaatctcttcacagagcctagtttttaagtatataggtggctgccatggttacaattgaagtgtacttatttccatgagaagatttgtgttgtaaatcaacttccttcctttctgctatgatctgaatatttgtgttccctcaaaaaccttttgttgagacctgattccaatgaaatagtattaagaggtgtgtccctttggcaatattagtcatggggtagagctctcatgaatggcattaatgcccttataaaagaggcccaaagaaatttacttgccccttctaccatgtgaaaatgcagcaagaaggtgccatctgtaaggaacataactatgagaaagaaatttatgtcatttataagctaccttgtttatggcatttttgttaaagcagcctgaaaggactaagacactttacatgttaattttgttatataaaagataaaaaagaccagtaattctgagacctgtagatactggcttgaattctggagtgtgagaagaagatgatgtggctttattatcaaagaataggcagtattttaaatgsatgctcatttggtttttgtataagaaaacattacttttgttacaattattagtacatgagattattaaaaatccaaaatagattttaatccacctgacaataaacctaatagtggaagacttctctggtcttatggtgaatttctaaatgtattccaggtctgttgctaagataactgactctaatttagaatatacctgttaagtacctcctctaagttctgaccacaagaacagatcaaagaataagacagtctttgtcccttgaaggatatcttagtggttgtatttatcaattgtattaataaagcaatctttattattattattgctattctattttgaattgtataggaagatgctaacattttaattaacaatatatcatcttatgtggcagatgttttaaaattatataaaagtaattctcattttagctgtaattttagaaatttgttcaaaggaataattgtatttgatacatttttaataaaaatcactatacttggaaaaattttacctctgtcactccatgacttgtgtgcattcaatctttctattgtaacttgtaggaagtttttgtttttgaaacgtagtttcactcttgttacccacgttggagtacaattggtgagatctcagctcactgaacctcccccttgggttcaagcgattctcctgcctcagcctctytagtagctgggattacaggtgcctgccaccacatccggctaattttttctatttttagtagagacggggtttcaccatgttggccaggttggtctcgaactccttacctcaggtgattcatccaccttggcctcccaaagtgttgggattacaggcgtgagccactgcgcccggccaacttgtaggaagttagtgtgaaatggcaagttagtctataggatatttggggtttgtttgttttttttkttttttttttttttcgagacggagtctcgctcttgttgcccaggctggagtgcagtggcatgatatcagctcactgcaacctccgccgcctgggttcaagcaattcttctgcctcagcctcctgagcagctgggattacaggcaygtatcaccacaccaggctactttttgtacttttagtagagacagggttttgccatgttggccaggctggtcttgaactcctgacctcaggtgatctacctgcctcggccttccaaagtgctgggattacaggcatgagccaccatgcccagcctataggatatttgtatatgaatctgtatgtgaagttcatattgtcattattgaattttaaagtttaaatagatcaaattttttgtagatgttaattttttttcctggtgtttggggacatatgacattagatctgaaagataacttcaaaactatataacaggccaaatattttgattccttgtaaggaacccaaaaaccagatgaattatttgtttaagttcataatgcaaatacagtggcaaagtcacaatgaaaacccaactaattttgtgcagcgttataggggtgttctatagtgatacaacttggcctttgcatcacattatcagttcaaatcctagcttagctcgttagctaccttcttgctagaaaaggcaagactttcaaaattagttaatactttctcttctagcagctattgatgttcaacaaatttcattaacctgtaaatgccccttggagttgtggccatactgttttattcattttttaagtatttacagtagaattgtcatttcagttactataagctgagtaactggacagcttctaagattacatttttttaatacacagaaaattcaggtaatttaaaaactgctttagattcatcttgaaatatatatttgctctggaatgaccatattgcagcatgattctcatgaacttcaaaatactttatttaaaaaacaacttgaggcagcaaaagtattatagttgtctgactttatccgtgtgatgtgcagggcctccttgtcttctgatctcagtaaacttacactgattgtttcagatcagaagagcagaaacggcttagttctaaagagactgtttggaaaacatttccaaataactgcagcacttggatgactacttccctgagttttgcttattcactgaaagcagaactactgtgccgagccctccagtgacatgggccttctgctctcccagacatttgcctctcttcacacctgttctgaatccagcatggagcagacgagaagtcatggagttctgacagttccagcacgtgtgtcccctttgcaaaggggaaaattacgttttgtaagagaccccaaatcagggtctcttataaaccctggggtaaaactattagaaatgatattatttttcatttatttaaaaaaaccacagcaaataaaatctgttagagttaaatatctgtgacgccctcctaaatcatctgtttcatttcagtaaatatttctaagatataatattctgttgacatagattgccccttgtgtttcatgtaacacagattgtatctttcttcaagctttttgtttcctcctcttctctgaagttttaaaaccagttttaactggcttacagtgtgtgtgtgtctgtgtgtgcatgcgtgtacatgcatgcatttgcactttcctttgttttgattttatcaccacctggcctttccatcaagttgcctggtgcttaagtaccacagttcatttgggcttagctttctgcctatatatgagactaacataaaaatagatttgttttctgtattcttgtggacatgagtgtatggtcttagggaaggtcattcaaaatgatttagtttataaaaataaatgtttatttactcatttgtttgagaggtatgaaccaaagtacacatatataaaaaggttatggattttaatattttaatgtattagattaaagatgaggctaatactgttgcttgaggatgataatttgacaatttacagtggcataaaggagaaagaatttattggtacttgtaattgagaatactgagttcaaacatggggtaaatccagggactgtaacaatgtcattaggaatatcactttattctgtttattcttttacctttttttttttctcacaaactttccttaggactatccataatgataatcagtaggtttctctaaccggtttaaccaccccagggggaaaattttcctaattttctaatagcttcaaacaaagttgatagcttcaataaaattaggattaagtctctggcttagcttgggtaatatgtgctgaaccagtcactgtggcctgaatgatagaatgctctgagcaagtcagggtcatatgttcacttactactgaagtgagtgatgcagttaggattgagatcagctctgtagtaatgacatgaactaaaagtaagagtgatagaagtttctccaaaagaaaataaggactctttagttactaggaatgagataaaaacaagaatattcacaatagtatagaaacataataataaaaatgtgttatttaatgattgatacaatactagattctctgtgggccttacttaagtggctttcaaatgtttttgcatattaaaatcacttgggaaggttttaaatatctcagtgtcctggctgcacaccaggccagttaaatcagaatttcgttagtacctaagcctgtgtaatttgttttgaagttccttaggaaaatcatgctaacaagaactaggtagacagatctggtagagtcaaggttcaaaaagagggatttcaggggacagagaagttcacatgggagaagcaggatccaatggagagaacagaggggcctcaaagagagagagaaagaaggacctccagcctaggaggtacctatcaaaagaagcgtgggactccaatctagtttcagagagtacactcaaaatcttaagtatcagaattcttgccagcttcagtgtatgttcagtggttcaggaatctgactcaccagtggatccccattaatcagtcagacgtgaattcaaaggtgcaaacatagggtcctgggtccagtgatgaatctgattctgagtcacagcaccataactgttaaagaaaaaattactcagtgatacttgttaaagcatgataaggctgactttcttcagaatcattgagatataggtataggggccacagctgtgggattttggaattggagaagagagactgggcccaactccaaatacagcatgggcaagtgggaatgtatacccaaggagcagggtcggggttggcggatggaaaattaagagtaacatcaaagtaaggggtttctgggtaaaacaacctaatgattcttgctgaagatggccagagtaatcagagtaattaatttggggaatggtgaaggataaggaacctgatcagatatcaagggtggggrtactcttgctaaactgactcagtagggttcttgctaaaactggtttttacaagagagagcacaggtaggtctacaagaagattcgggagactgactaaagtttcatcaagaatctttgtcaggagacatgacctttatgatacttaagtttttctttttatgcggttttgttttaaacaggctaatagctcgtcagcttgctaaaatccatgctattcatgcacacaatggctggatccccaaatctaatctttggctaaagatgggaaagtatttctctctcattcccacaggatttgcagatgaagacattaataaaaggtaaaattatttttacatttgaaattatgttttacattgctttgctctatgatagggtttcaaaggtaattgtaaagtttcattgtataaaatctggttttctttctttgcattgaagtaaagtaagcattgattctttggctgtcagatagcactacagaaataactgcctctccatccccctcagtgtcccctcccaaaaaatatgccctacaacagcaaggggcagaggtggaagtaggggaacaccacttaaaaataaagagktaggtggtaatggtgaagcaagatttttcttgactttttaagatactgcagggttgagaggcaagtctagtattatatagaataagagcacaagagcctggagccaaactgagattaaatcttagtcctgctagttaacatttctgttgtgtaactcattcaactagggaacttaacctaactgtttccttatctataaaatggaaattacagtagtagtatattaaccatatagagtttttgtgaggattgagatagtatatgtaaagttctttaaaacagtgcctggtcatcacttaagtgttgaggtagctgctgttttaaaaattactattgttattcaaagaaggttatttgagttatattttttccctaggctctccaaggtatactttaaatccttgaggttartgattctttggaaaagctggaggtgtgctgtggtaaataataggaagaaaacccttgccccaatagaaaataatacaactagaacataaaacacaattaaaatattaaatacattttgtatttcttttattccattttgtttgttcatgatttaagttttataatccttcgaatcccacaattttcattcgacactacctttaaaaaaaaaaaaaaaaaaaaacaccgcagttttgaccagtcataccattttgaaaagagcattatgaggattacttgtggaagttgtatgtagagaagaatacagtagtggagaaaatataggtagaaaccacctgaacaggcaaattaagtaatgtaaaaagaatctgtattatactgttaatggagaagcagggagtaatttgagagactttggagaaagaatcaagaggtcatgacttaaagtattaagggaaggagtgaaggagtatasccgttttgtaagcctgattggtgctattgaggaattagtggtagtagcccaattttgtttccttgattttttaatcaaattaatacaagtatagataataatcagtatagatgaggataggacaaaaagtcgcgatttctagtccagcttaccatgttgcctcccacccttcacagtctcactactctgtggcaatttctataatagttctgtttttaacataactggattatataaggataactttattttttatcaactgtagacagtaatcttttgacttttctgagaatttagatttatattgcattcaccctttcaaccttgaaatatgtatttttaatttttaaaataatttttgtaactttaaataatatacttaaacctctatttattaaatgctttgtgtcttagttttgtcatctataaaattgacataaatgtaaattacttagaatagtacttagtaattgttaactattacctatatatattacttagaaacccaagtttttagtgagttttttaacttttgtcctacattttaattgctgctcagtttcttctattcatgtctaaacttactatataggttttctttattctaacttttgaaatagaataattggtctgttgtttgaattcagcagtatgtgcgattaaattgaagggatttattcaaaatagattttaatccttaatcaaacttgaaaaaaatgtcacacaagatataactcttcttttaaaactaaaaggttcctaagtgatatcccaagctctcagattctccaggargagatgacttggatgaaggagattctttccaacctgggctcacctgttgtgctttgccataatgacctattgtgtaagaatataatctacaatgagaaacaaggtaggtatttgaccttagcagtaagtaaaattgatttcttttatgttcttaatggtcattttatctctatatcaacaaaataaattcaaatgcaaggagtaagagcgtgcatgaaacctttaaagattttcttttagtttatcaagttatggtaactgtgaaatttaggatatatattctttttatatttgtataaaatatgttttttagaattggttagaaacagtttgtgatttccatgggatttttaggtataaaatgatgaaatgatttgtttataaatttaattgcaaaacttatttggttattcatgagttgaacatgtacctgcttgtaatgggggatgtggaaaatcaacatattgacattaaactgctttataaatagaaaaattttctcacagtgttgggaaggacaacagtattaaaaacaaatgtgtctccaggtttctcattatctagttattgttgatttgttagatattttgatactaaggagagagctacagatggaggagatattatttgtagttgctcaaatttatatctactaaagtaatcaagaaaccttggtagataatttcaacattttttgaggtagactgatactttttggtgaaatgtttttgtgtttatatttgtacactgtattcaatttctgttttcatatttaagaaccactcggttgtattatattactgggtgaagtggtttgaggtttggttgctaaatgatagatgcccttcaatgctaaattgaaatttaaaaataaaattttggttgaaggagtcttactaacttaaaaaatgtttttgaaactgttttcattttataggaaactagttccccgcaccccccccctttttttttccttttttgagatggagtttcactcttgtcacccaggctggagtgcaatggcataatctcagctcactgtaacttccgcctcccaagttcaagtgattctcctgcctcagcctcctgaatagttgggattacaggtgcacatcaccatgcccggctaatttttgtatttttttttttttttttttttttttagaagagatagagtttcaccatgttggccaggctggtctcgaactcctgaccccaggtgatccgcccacctcggcctcccaaagcgctgggattacaggtgtgagccactgagcctggcctttcctttttttttttttttttaagtgactggatctcagtatgtcacccaggcctggaatgcagtggtgtaatcatggctcactgcagccttcaactcttgggctcaagcagtcctcstgccccagtcccctgagtagctgggactacaggtacatgccatcatacctgactaatttcaaaatttgtttttgtggagatggaatcttgctctgttgcccaggctggttttgaatttgtggcctcaagtgatcctcctgccttggcctcctaaagtgctgggattactggcgtgagccactgtgcctggcctggaaaccagtttttgaagatagttattacagttggaagagctgattttgaatcaaaattgtgctgttgtaaatatagtaaagcctaagaattcacattagcatggtcataattatattaaattactgtttatgacccttcttagagtgtaaagcgggactattcaaatacaaaggttgatagatatagctgactttcactttaagaaaaccaaaggtacactgtcaagagtggtaggcttaagcacatattgccaaaaatatatttgagaattttttgtttgatatttcaatgttgattagagattctatttttcaaaaacatactgagctaacatttttgttttgaatcatcttgaaatgcttgtgtggaatcatttttaaaatttcgagcataccctaaaacattaagtacttgacagtgtcctttaatgtcttattgtctgttatatataattatcatagtacgtatgcactacattatatactggtaaccaaatctcaatgccatttgtgagactagagcattagttacgcattaaagcagtgtatgagcttgtaaattcagtgcaggacctaataacacattttatataatggaatttcaagtgagggacttcatcttacatttgaagtggacactcagctttatttttaactgcaagttgatcaaagagaatctgttatttcctttagaatataattttaaactttcatatttttatttttgtaagtttcttttgcatattcatttcacagaacaaaacttgtttataaaaccaaaaaataagggaccaaaaaaatcagattactttgtcttgggtgttaaaaaatacattttcacttttttatttaagtggtcacttatctctaaactattgatcagttatgtgaaaagttcccatgttttcacataaaatctttattcagtttggctttaagaatgcaaggttgtcatttgtttttgtgccaagttacttgaattatacttttgtgtctaattttcctttcacagaaaaattttacagctgtacagatgaactattttgatacattttttagaatttgccttttttattgaagtctagtttgtatcatttgttttttctttgtctttgtggttatgtatgtgtcttagttacagaaatgttctgttttttttttctctctccttacgtggttttataatgttcattaggaaggctggttttgatcccatagtatccgtttaaaagagtaatttctatgtgattacttcaaacataagcattaagaaatatggttagaatgttcaaataaaaatctaaaactaaagtatgacaagaagcttacttaacctagtctttagtgttacgtttcaaattgggagctaatggttttaaggtaatttaactatatgacatgtttgagtgtttactataagtagaagatgccatgccttatacttaaaaagtatgaattatattatttaataaatttaatagtcaaaaatagtcaatattgagtaaatgtaatatgcaaactagttatatgtttgcatttaatatgcaaataatataatatgcatataatataactagtaggtatgtttgcatattaaatgcaagcatctaactagtagatataggacttaattaacagatatgacatgacgattcagttcactaaaagtggaacttttagtttctatcttaactataacttgagagattaatttagattaatttagaattaaaatgtgtatgtatatgggtatatgtataagtaacatatttatacacaaggcacacatactatgagcaccctgcaatttgtaggcatttttacatgtgaatgttattggaactggtagacatcacaggaagaaattttatatatttgagattgtagcatagcattaacacttatggcagcaattttgaaaaggttaattaaagatacagactgcagttatttaccttctttagttgccttattatagcatataaatgccatgttgagtcttttgagattaagataatttccatatagaataaatgattaagctgcatattcacaaacatgtttgattttttattacttcttaagtcattcatatgacttgagctccaggtttcattattgtgtacccaactttgagataccaatagataaaacgtaataagatgaaagccaggggactggccttggaatcatcaagctcagtatttgtctgcagtatgtttcagacccttaatttctcagaagtacaaattttaggcaaacttcttaaatttatactggattatcttgatgtctctacatatatgtttaaaccatagtaacttagattttgtactagaaaatctctaactcttaaaagcagatatatttatagcttagttactatcaagagaagtcagaaagagtatagattttggaactaaacacattcgagtttagatccctacccagttacttacagaaataagtagtattagacatatcgttttatctctttatgtctttatgtaaacacagactgttcttgacagtttacatcagaatcacctatggtacttgggaaaaaatttggatttcttggccccacccatgaccaattacaaaataatttttatagataggcttagaaattttatgtttaacagattctgaggcagtttttgtactattgatagtctagaactttagtttgctttatttgtaacttagagacaatatctacttcagatggatgctgacaagattttagatcatgcatataaaatatatagcactggaccaaggacttagcagctcttagttgtagctattatactaacataggggttggcaaacattttctgtaaggggctatgtagtacaacttttaggcattgtgggctggatagtctccattgcaacatttcagctgtgtgttgaggcatgaacacagccatagacaatacatgagtgagctgtgttcaaataaaactttatttccaaaaataggtggtggattggatttgagctgaaggtacatggtttgccaaccctgtattatgtttatagcatttgttttacaaaatatacctgattctgaaaaaatgaaaaatggttactataggctagatagtaggtagttaagtcctataactactagtaggtagttataggacttaattaacagatagatatgatgtgacaattcagtttaagtgcaactttcagtttctatcttaactataacttgagagattaatttagaattacaaatgtgtgtatatatatatatgagcatatgtatacataacatatttacacacaaggcacacatactatgagcaccctgcagtttgtaggcatttttacatgcgaatgttattggaacagataggcatcacgggaagaaattttgcctctacctgctctcaccatgtcagttgacaggactcaggacatgggagaagagtgagcttcctttctgaagttgatggtagctgtcaagatttttgaaaagttagtgccaggaattaggtgattggtaagcagcggcccattccttgccttcagtgaaatgacatcctgaaaaggtaagaaaagaatacttaatgatatggtgatagaatttgatatataataaggaaaccaaaagcagcagttcttgctccagaactataggaattatcagtcatcttttaaatcaatcattaatttaatagactttatattaagcagaataaattgtaatattgcytatgactaacttcaaatctaatattttaatttcaactaatcatttaactactgacatcaagaaattactaaagctgttgagatttctatctcatgtcttgatgttctctcagaatgtttattggtctcatgacttttggtgactttcatttctcctsctgtccccatttcttcataaaagctcatgtaaatacctaatatttaactttaaatttcagtaatggcaatcactgtttattttctctgtcagcacaatacaagaagctgatttacagctgtttaaggaaatacaaatgagtggaagaaaaggaaagctttttctgggaattaaagagtaaatcaggttttgttttattttgctttgttttaagagttctatacaatataaatagaaaatgggtgagtccccatagtcacttgtttggctctaaatcttatccattctattattactcctgagaaagctttgtagttgtcatgttactcatgttttaatgactgagaagagttttttcattggtacttttaaaaaatttaaataaatacaaattgatttttgtgtttggtaaactatgttttmtagggtggtgtttttaaatgtagtttaatttttaactctgttttaatttgtattctcaaccactagttagcagaaaataaaatatctgtaagtcagataataaaaaacttaaatgaactgtaaaaacctgaagttatgaagaaagagtgacctaatataggtactagtttgtttgttttttcattcattcattctggcccactgtgttcagtcttgtacttgaataaaaatgtcagaaacaccacacttttttctttagtttttcatgcttttttgtcttttcccctcccccagcaaacgtgttattgtgtgtcagcattttctgcaaacttcattttttctactagcatttaaatatttcctgtgtcctagggattgctctgtggattgcaggataaaagagggaagggaccctagtgcccctccaggaggctgtgtatcttgtagtggaggagtccaatcactgaacagatacttacatttagaatgatgagtgctctggtgaaggggtacagagtactacaggacaccagcgtgaagattaaagggaaagtgtttcagactagaatactccctgtctttttstgtataaaatagaaaacattttgctaacattagtaggattatagttacttttcgtatcgttctcttcgaacctgcctaacattgcagagcaagtagggtgagttggaaagatttttcaggttctcatattgactattttgcttttcatttttattcctttctcctaacaacaaaataaaggaattcagacaaacatgtcatgtgataattatatagccttgggtaatacattattattttttagttttaaagtactttaaaaattggcagagtatttttagtatactaagatttgaacagtttaaccagtagtgtcgggatttgattacgctgataaagatatgcaagaaataaagtaataaaagacaaaatgtaggtttggaaaattcaaattgtagttttatccattaatcatatactttactttgtgcttgtcattgtgataattacataaagataaataaaataacacacctagcccttaaagtagtagttctttactttttaaaggtcaggggtcccttgagaatctgaaaaattgagaatctcttcctaagaaagtgcacatacacataaaattttagggaatattctagttgtcttttcatccttgaaaccccaattaaaaattcatgtcttaaagaactgagatgatgatcatgctatatgagctagttaattattaatgctgatgtggatattcgtttaaataaagcgaaattttagaaatcagaagttaaatttatagaaggaaaaagtatattttctgttgttaggaaagcattttccagtaatttgatttttctggcaccctaactaagggaagttggctttttaaattttactttgttgcagaagattaaatttaaggttgagttccactttgtttgcaatagtttgaaaaagaatagttaatgcagattttttttttaaatttttttccttttaagctttgtgtcttgtacaatgtgagtttgccaaattttcttcatctgctacagattaggtatgccattgttgctgccatgtggcggcgcaccccgtgcttcttaaacgcactgactggaggtttatcgcatcacttgttcacatgcacggagcctggtaacagcctcatctgtatcttgttagcttcattttcttatttttaaaatttcattatttataaactcaacatagcatttaaaaataaaggctagttttaattaattaatgttactacaaaaagtcattgctaaaattttcatagtgaaacagattttaacttttgttaaaatgtgctatgctttaattaaattgtatttactctacaagcagggatgttttacctgccattttaactgtatttgccaaattctaaatataattttgaaaattgaaattgaagcttatgtttatgtggcaaaagtaagcttcaggactgggctgtgtatttttattggcatgtaacagttaatatgagctctacaagaatttgtttttaaggagctaaagctatcaacagctgcagatttaaaaaattatatattaaaactgttaggttagctcagttgtacaacttagtgaatcttgtatcctgagtttctgaaggctggtggataggtatctctgaaatcattgtgttttagtctttttactgatagttttgtatagggaattcatcttctcttttaaaataacttttttcctttaatttatttctattacttattgtacataaattttaaaataaaaaaataaaagaaaaaagtcacttgtctatcacctgttaatagtttaaacattttggtttatttccattcatccttcccccccatgcattatttacatatttttttttctctgtaggcatattttaatttggatcacagtttastacttagtatctccttttcatgacatttgtaatttccctggtcattatttttgaaaatgagatttcttcatggttttatttcattttattttcatgcctgtgagtattttatcatgatggttgtcttcactctcctactcccaatgattcctagaaaagaaactttaaaacatgtttctacttcccattctgcagtttagtaaaatgatttggytaactcttaaaactttttgtggaataatgttctgtgaattcaagtatacaaggcaggaggatcacttcaggccaggagttccataccagcttgggcaacatagcaagaccccgtctctacaaaaaacaaaaagagaaaaaaaatatataatacttgaggtagttgaattgccgtgatttattgtcaccaatatttttaaatcttatatttattataataatacacattacatttttataactgggttataacattgattattctcacttattctagatgtgacttatttaaataagtttagaattatatattaaatacaattatattaaaaacatttttgcttttatgtaaaacactatttgccatgacattttttgtcacgtaattttgtttttctttgtgtttgaatatgatcaaatacttcccaaaattaaacttacaaatgtatatcaacatattataattcaaaagctgtttttatttgggaaataaataacaatgtgtaaagaccgggaatttgttctcctacctaagcctgatgattaaaagacagtgtaactatgcaggtgttaaacattttctatattcttacagccatctctgttcatatatccatttttaactccacgcccctgtaagcctttgagtttgtgatccctggtgaagacagtgacccacattgattttttttttttttaaggtttctctctctcttttttgctttttctctcgaatataggacctatatctttgttaaggcaaatcctttataatattcattactcaaaagttaaaagttcctgagtagtagtatgaaagaactagattatctttggagagttataatgacatgcctatatatgtagcagtaatttagaataggcatctatttagcttatgtgaaaatttctcacgtttataaacgttaaaagaaaccatacttttgctttttgtaagataaaaccaccaccttattgcaccgtaatgctgctcagatatggaaaccttggttaggtagtattacaggaaaatgtaagcatatgatarcaactaacttcttgttagtgatcttacattgctcagcaagtatagcattattgcaagatttacagaattcaggtctttaaaagtttatattttatttccatatgtagataagcttgtcagtttactgttggagtatcataaagtttttgttaaaattacacagattattagtaatttccaaagataaaaattatgtttctaattaaacttgaatttttaagtaactgatgcccccatgtggcaaaggatttattttgcttttgcttaaacttggagaatgactgtcttttcatttttctttaaaaaagtggacattagtgtttataaagaagctgttgaccaagagacataatttgaattttgtaaagctcattgccataaaattcacagccccttaccctgtattgtctcacaagtgcatgtaatcaagcacgtacaatgagacaaaatattggaagctatttaattacaaatagcatagggattttctgatcttatatgtgatttcttaatgtctttgtttttgtgtctcacataggtgatgtacagttcattgattatgaatattctggatacaactacctggcatatgatattggaaatcatttcaatgaatttgcaggtataactaatggagtaacttatttagctttgaaacgatattttcagaatatttcattctttttttaaagtagataaaccgtgagcagggggaacattttcccacgtgttgttgaccgtttttctttgcttttgtttatcactggaagaaagcagagatgaccaaaatttcttccttaattgctatcagaaagtaataggtggccgggcgcggtggctcacgcctgtaatcccagcactttgggaggccgaggtgggcggatcacgaggtcaggagattgagaccatcctggctaacacggtgaaaccccgtttctactaaaaatacaaaaaatttagccgggcgtggtggtgggcgcctgtagtcccagctacttgggaggctgaggcaggagaatggcgtgaacccgggaggcagagtttgcagtgagccgagatcgcgctactgcactccagcctgggcgatagagcaagactccatctcattaaaaaaaaaaaaaaaaaaaaaagtaatagataggagaaaaataatgattgtggcttctgttgagatcagacatagcataaggtgcttcataaatcttacctcatttttttctccacagcagccctacaaggtaatactcgcagtttacatatcaagaaagaaactcaccaaggtcacagtaaaatacagagaactaagatttgaagctaatttttaagcatttaaaaagcctttgctgtttccattgtaaactggggcttttggaatattagttcactaaaaagttcaataaccttttttgactttgtctatgaatattgaaaagttggtcatttttacccctattaatttataattacttaagttaaaattactagttttttaaatgtaagtgggaagaatttaaaatccattttatcactctttatttagaaacacgaaatgctctaaaaactaaagattagaacataccccagaatggtttatacctagtaggaattttttattgttgaatttatatttgtgtaagtttatatatttatatatttttatatacttcagattaccagactgggaaatactctgggaaaaaattttaatttgatgtttccagttattttggactaccaagcttatcatatacatataagctgtacatatttttacgtatctcatctatggaaggggaactagctgtgcatataataaaatattaacatgttagtaatatagacggccactgccgtggatatgaaatagaaaactccagtgatcttctaatgattttgtggacaaaaaaagtgagctaaaccttgtgagttaggtagaatttggatgtgcaaactaaagagaaggaaaggggaaaaaactttaagatgaactacttacttttataggatatagaattcatgaaggagactacagagttataggactagtgaggtagatttagaccaacttctaaagaaccttggatggcaagatagtatgaactttgtcttctaggttagtattttccaaactatagatcatgaagttaaatttgtggggtaatgacttttttgtttgcaaggaatggaaaagagaaacaaaatctcagagttggaaaatgttgttgggataaatactgttttgtgaaatgtagtatcagctggttctatgtataaggtctcaaaaaaaatgtattcttggttgcagtgagccgaaatcatgccactgcactccagcctgggtgactgaacgagattccgtctccaaaaaaaaaagtattcttaccatgagtcatggtttgaaaagttttatagccacactttgaggtagtgctccaaatgtcagcatgcttaagaatttcctgggttgcttcctaaaatgcatagtttgggtttgtgatgcagctggttcaagctataaactttgaggaaaaattgaagctatgagaattgatttggtgatcaacagtaatgtgccttagtgtttaagctgaaatacagaatgattggtttattattttaataaatgctttttacttaacatgcagtattccagccaaaatggaacttttcattttttatgaaaaaatggtggttttagggattattaaggtatgcagaagagtttatgttttaaaatttttgagtgtagttttttttcttctaaaggtgtgagtgatgtagactatagtctgtatccagatagagaactacagagtcagtggctgcgtgcttaccttgaagcctacaaagaatttaagggctttgggactgaagttactgaaaaggaggtagaaatactcttcattcaagtcaatcagtttgcattggtaagtttaaatgtacacaattaatgaaaggttcttactgtaattgaaaatgcttctaaattttcgtcatcttagacaatttcctattttaagttttgtgaatttttgttcaaaataatgtaaatacatgaccatttacagtatgcattaccccattgcattagttttaaggacaaaaattttgtttcatttcctgctatatccccatcccctakaacaatgcctggccatatgataggtactcagtaattatttgtttaatgagtagattcttatcagggttaagattgatgcataaaacaatttcttagtctattcctttctttacatcaaagtcaaattttacaggagaggagcttttccacaacacattttatggttagatcttatgtgataaaagtaggttggaagaacctgtaggattatgttttttatgacttatccagtgttttgtcttcttgaccttcatttgataagcagttatttccagctttattggtgtcttaaagctttattattaagacctacttctctttacatgcatttatattttaaaaatgagctcattatcttttgagaataatatgatacattagaatgatctttcaactaaggtgttagataattaaatggaataataagccaaagctattttagctgctgctttttggttttaatataattttgtatagttgacatgggaaatatttgttgtgttgtctctacagatagaccctagtggtatatgggtatgccatttttatagtcttaaaagtaccatatgcccagagttactcagaatacatcccaagtaagaaggtgtcctgaaatgttcctttacctgctgttcttctatctattttcagtacagttactggttcaattaatgacatgctctacagctggtcctaggatgcctgcttttctatttattgtatttaagcatgatcttagagaatgtagggttttctttctcattaggtgatttaatgaatttcagattcagcctaatattccatttatgcattgaattagttaatttccaggtaaagtacacatagctcatcaattcttaaccatcaatcccactgtttgctattagaaagctgatttggatttccttgcaaacttttgatgacatttaagatttttgggggatactgtgactgtatctgtacatggcattgaaaaatacctttgcttctgatttgatcaattgtttataaatattcatcaatcagatactaagtacttactgttattctaggtcagtagattggaagaataaaaaaaatgcactctttcaaaatgcttataatttagaaggccaaataagatgtacagaataactcttttggtggtaaaagttaacactcatttcttttgaaattgattttattttaatatttacttttatttttattttgagacagtctttgctttgtcatccaggcctggagtatagtgatgtgatcacagctcattgcagcctcaacctcccgggcttaagcagtcctcccacttgagccttctgagtagcaagcgccaccatgcctggctaatttttttaatttttctgtggagatgaggtctctctatattgcccaggctggtcttgaactcctgggcctaagtgattcttcccggctcagcctcccaaagtgctgggaatttataggtatgagccatcatgccagacctatttttttattagatacaaggtcttgctctgtcacgcaggctggaatgcagtggtacgatcatagctcactgcagcctcaaactcctgagcacaaggggttctcccaactcagcctcccaagtagctaggactacaggcgcatgccaccatgcctggctgattttttaaaactttttggagagacaaggtcttgctatgttgctcaggctggtcttggactcctggcctcaagcagttctccagcctcagcctcccagggtattgggactacaggcataagccctatacccagccataacacccgttttgctgtaaaattattggtaaattggaattagaaggaaacttacttactctgattcaaaatgaaaaagaatatcttcatgaaatgaacaacagatatattaataaatgtcatacattcagtagaaggtctgattaaaaaaagataaaggacaattgatagacataaaacttcagtacctttttaataacatttctgaataatttaatatgtcctctgaacttacatatactaagtttttccatagggcatatagtaagtgttatactctgagattctgataccaatttctagttcttcctcattaagaaacattaaaagcccgttatttatttcaattaaaaaaattttttattattatactttaagttctggggtacatgtgcagaacctgcaggtttgttacataggtatacatgtgccatggtggtttgctgcacccatcaacctgtcatgcacattaggtatttcttctaatgctgtcccttccctagccccctacccactgacaggccccggtgtgtgatgttcccctccctgtgtccatgtgctctcattattcaactcccacttatgagtgagaaaatgtggtgtttggttttctgtcctgtgttagtttgctgagaatgatggtttccagcttcatccatgttcctgcaaaggacatgaactcatcgtttttgatggctgtttagtattccatggtgtatatgtgccacattttctttatccaatctatcattgatgggcatttgggttggttccaggtctttgctattgtgaatagtgcctcagtaaacatacgtgtgcatgtgtctttatagtagaatgatttataatcctttgggtatatacccagtaatgggattcctgggtcaaatggtatttctggttgtggattcttgaggaattgccacactgtcttccacaatggttgaactaatttacactcccaccaagagtataaaagcgtttctgtttctccacatcctctccggcatctattgtttcctgactttttaatgatcaccattctaactggcgtgaaatggtatctatctcattgtggttttgatttgcatttctctaatgactagtgatgatgagctttttttcatatgtttgttgaccgtataaatgtcttcttttgagaagtgtctgttcatatcctttgcctacgttttgatgggttttttttttcttgtaaatttgtttaagttttttgtagattctggatattagccctttgtcacatggatggattgcaaaaattttctcccattctgtgggttgcctgttcactctgacgatagtttcttttgctgtgcagaagctctttagtttaattagatcccatttgtatactttggctttggttgccattgcttttggtgtttgtagtcatgaagtctttgcccatgcctgtgtcctgaatggtattgcctaggttttcttctagggtttttatggttttaggtcttatgtttaagtctttaatccatcttgagttaatttttgtatgaggtgtaaggaaggggtccagtttcagttttctgcatatggctagccagttttcccaacaccatttattaaagagggaattttttccccattgcttgtttttctcagatttgtcaaagatcagatggttgtagatgtgtggtgttatttctgagacctctgttctgttccattgatctatatatctgttttggtaccagtaccatgctgttttgattactgtagccttgtagtatagtttgaagtcaggtagcatgatgcctccagctttgttctttttgcttaggattgtcttggctatgcagggtcttttttggttccatatgaaatttaaagtagttttctgtaattctgtgaagaaagtcaatggaagcttgatgggaatagcattgaatctgtaagttactttgggcagtattgccattttcacaatatttattcttcgtatctatgagcatggaatgtttttccatttgtgcatgtcctcttatttccttgatcagtggttttgtagttctccttgaagaggtctttcacatcccttgtacgttgtattcctgggcatttaattctcttygcagcaattgtgaatgggagttcactcatgatttggctctctgtttgtctgttattggtgtatrggaatgcttgtgatttttgtaaattgatttttttttcctgagactttgctgaagttgcttttcagcttaaggagattttgaaaagccctttatttatcaagtcagtttttgtttcgattcctgttcttattttatcagaatttgctgatcgtctgttgtgtgcttttcctgcccttctgggatgtcacaactttcttgcatcagggcctctgttgctatcttcttttgacatatcttcttttcttttccaagactttctatatcttctttttagctagccgtttaccttcctctcttaccaactcttaatttcctccgactgtttattaagtatgtgcctctcgcatctcaagcatttgaatgaatcaataattgtgattgcaatgtgaaataaaaggaaaccctgaatcttactcctttatycttcatgcgtttctcagacactgcaatctgccttttccctcactgctgtaaaaagaaaatcaggtaaggcttaccaatcatgacataattgccaagtccaatgtaaatttttcagtccttatcttacttgatctgtcagtagcatttgacagtatttaccattgatttaaaaaatgttctcttgttgacttttgtgatagttttatgtatggtgaaaataaggaaatgatcaaagtctggtttcatgaattacacactttattgccatacaaagatarttttttccccttaggttcacaatgcttaaagagaggaagaacaacctgaacaaatctcacagggaatatactcaatagatgaggtacattaactatataatgagtgagttccaaattgttaaaagtctagtccaattcggatgaaagcaggagaggattgagctttttacgattagtttcttgggcttgaccaacataggagagatccatgaagacacttgaagttcctggacacaagaagttggacgttaatgttgtcatgacaagacttcaaagctccaaggcctgtagaggcctgaactctgcttttggagaagtaactgacagagtgtagcctgtcacagactaagtgttcagaatgtcaaactgttatgtttatatgtattttgaagtccactagttaaggtcagttactcacatggggtctgagaaagtgtaatgtaacattcccaagaggggaaggagttcaccccaagtactcacatatggagtttgtattggcattctccagagggacagaactaatgggatatatgtataagtggaaggaagtttattagggagaattggctcacctgatcacaagttgaagtctcacagtaggccgtctgcacgctgaggaagaaagaagccagtagtggcgcagtacaagtttgaaagtctcaaaaccagaagagccgacagtgctgccttcagtctgtggccaaaggcccaagagccccctggcaaaccactggcgtttaagtccaagtgtccaaatgctgaagaacttggattctgaagtccaagggcaggaggaagcatccaacatggggaaaaagaaggaagccagaaaacccagcaagcaaagttatcctaccttcttctgcctgctttgtttttgccgtgctggcagccaattggatgataccagccgacattgagggtgggtcttcctctcccagtccacagactcaaatgtcagtctcctctggcaacaccctcacagacacacccagaaacaatactttcctagccaactaggcaaccctcgatccaatcaagttgacacctaacattaaccatcatagggtccgataagacttcgcattctcctagggagtgggagtagttgcattttacatatgcgatctgatagttctcatattcgtgttttttgttcttggttttttgttttttttttttttttgatatggagtctcactctatcgcccagccttgagtgcagtggcacaatcttggctcactgcaacctctgcctcctggattcaagcagttctctggcctcagtagctaggagtacaggcgtttgccgccacacccagctaatttttgtatttttggtaaagacgggktttcaccatatcggctaggctggtttcgaactcctgacctcaaatgatccacccacctcggcctccccgagtgttgggattacaggtgtgagccacctcacctggccatattcttgaagggtggaggaatacatacatcattttaaagctgtgtgacaaattctctttttgtactgtcttgctcagtctcttaatctggctcctctttcctcctcttctcccagccctcttacatgttaacagtattccctagtgttctgatttgggtctaccccttccaagttctgttcttggttcctaaaatgttcttgatttcagcaccttctccttttattttttacctttgattgaggactgaatctcttgccaacattagcctttactggtctctttgccttcagttttttttgttgttgttttgtttttcctgtctttcatttattctgtatattaaaaaagtgatcctttctagtaattagaatttaattaattagattgtgtcacttttctattttatggctccctgtgacctacagaatgaaatccaaatgacagcatctgcaaactcttatttcccactacttcacacgtcctacttctgctctagcagagtcattttgtgcgggcatactccatgatgttgcatgtctgtgtacttagaagcttattccttctacctggaatgccttttaccctgcatctcttggcagatttctcttattccttatggatgtgtcttaagtgctgtttcctccttagatagtttatgaagctgctttgataaaaagaaaagcaggtctgaatgataagatcagggtatacatgttttgaaatagtataaatggttagtaaatgttgattgctcaggccatgatacagacttctaaagattataacatttcacttgtcattgattgtttaatgttgagatggtggcaaacaaaagtaggtatatgggttataaaaccaaacagagtatacgtaatggctttgtggagcttttcttccccckcccccccctccattatatgcacactggggatttattttagttatttatttaccatataaagctttgaatatttctttgcaacaggggtaagtagtctagaaattaaaataccctttaacagagagacttacatatccataacttccaaatgtgaaagagatagtatagttacagaatttattatttttttggatgtacttgtattttggggggatgcaaatgatgaatgggctgttttctgcctttgtttctcatccatttagaatctactgttatatattaatttatcacttttccccctataaaaatggttgcctacacaaatgagatttcagtgaggttttatggataatgcttctctagtgtagaatcgtttagttaatttatataagtatatgaataaaaactgattgagaaatatagttaccatctctgcttgacaatggtgagaagagctaagttggtatgtttttaaaatgcagaatgactcttgatttctcagtcttttccactacagagcaaatttagtaggaagaagagattaggataccatctataggtgattttatatcagcgtaaaatatgcaaggcaatttagactagtggttctcaaatttttcaatcttaggaccccttcatacttaaaatgtttttgaagacctctacaagcttttgtttttgtgaaataattaacagtatttaacatattagaagtcaaaattcaaacatttaagtatatatatatatttaaaataaactcattacattaacgcaaatgccataaatagaatactatttttcaaaacaaaaaacaatttagtgagaagactggcattattttacacttctgcaaatttctttaatgtctggtttaatggaatacagcaggattcccgtatctgcttctgcattacatcttttgtgatggattgtttcatttcaagtatatgaaaaaaagtttcacacatgcatgttggaaaagaggagtattttgccttttcagataattgtggatattcttttttgatactagaccaaagctcaacaagtgatagtttcttaaaggttagttgccatgaataatctgaatgtatcaattaattttttactctattacattaaaatctactggtttatcttgcagattgaatgattcttttacctgtatgtgattttgtaattttaacttattagttatttggaaaataattgattcattgagttgtatagatcttccaaatgttgacacatctcattataagatagctaaagatcacatatgttgatatcaccaccagtgtcatcagaaaaacttatagtactatattgagaagctgttaagctcacagaatcacataaaacttttctcatgttctaattttagggtgaaaacttgaattttatcattggcaacaaatattgtcagttattttcactgaaatggcaagttatcttttttatagttgagaaaatgtctgccaaatactcaagtctgataactctagtttgataactctagtttgtatattagtcatttttttcaagtaaaaattgtgtcccattaaaaatgtgcaaattcaactcaaaagtcagttacctaggtgtttttcctgagacatccattgtactttggatatgcagtagacgtgctttatatgtactgcctatttcctcccacagaatactagagcacgtactccagggtagagatttaataaaattaatagttttaatggcttcacaaaggacattctttagtgacattggctttttactgttattgtgtgatggtgaagaataagactattacactagtgtgatttgctaccactgccttgacttaaggtaacagtagtttcaccctcactgcttttgaaccattggtgcaaatgttaacatagtcaaaaaggcaagtaacatatcagtataattatgaaagtaattttgggcctccgaaaactcccatgggttcatcgaccactttaagaacctctgatgtagactttgaaaagaaggaagtcctctaatttcataatttcatttctcaatacctgatatacttttttagatagaagaccatttttgaaaatctttatcatttttaatcattctggtttcatatagtaagaatagctagcattctattgaatatttgttatatgccagctataggtactattatgacctacattttacagatgaggaaataaacgcaccacgtgaagtgcttaaagccacacgccagagcccagcttgtttttttaacttttatgcttcatgtgcaagtgactttagttgtttagtctttgctacattgtttattcttttctatctctatatcaggaaagaaattatattcctgttctttttttttttttaagagacagtgtctcactgtgttgcccaagctggagtgcagtggcatgctcctcactgcagccttgaactcctgagctctagtgatcaccagcctcctgaatagctgaatagttagtggtatttttttgaggaagccaaaaacaaagtgcagagtgctttttaaatagagatctttaggttgaaaaattttttttacatgtattatatcctttagtctttaaaacaatcctgtgtagaatacagaatggctaatattcccatctcgtaaatgatagatctgacactaaagtttgtgacttattaaaggttgcaaaggtactcagagatagagcctggactggaacctctacatcttgtaattcaaattaagaattctttttggtatactgtgctgcttggtatttttaaataccaaggtcatggctgttgaatacttttttgttagagcccctttgttactgttgctgtaatgaatttagctgaaacaaaaaccttgtctttaatactgtttctacttagaatatttctagttagaatatagtatttcttgggaagtgaaatcttgttcagattttaaaatattaccctgtttaactgaaaatagattgtaaagcacacataattattttacagttactaattacatgctaatttccctgtaagtccaaaacccatatttttcctgacataagttgtgttactttatgttgtggtctgttatgcagaattaarccagtaagatcattttcagatgtttgtcacccctagaacatttttcacatttaaatatatttattgcttgtgagatttggattttcttttgtgtttatatttgtatgtcaagaaacaaaggcctttgatataataatgtgtaagcctgttagcaattataaccattaaaaacactaacatctatcagtgctgatggtaaactttgctttataaaaaagcacatcacaggaactggcctctatttttcaagtgattataatttaccataatctcctttggtgttgacgaaagtgatctgtagccatctagtgggtgcagacgtcagtaggatctaggttttrgacgctttatataaaaagaacagcaagaaagtgtggtgcatggagttgatttagaggatagaattagcaattcatatgtgttttacagagaaattcattatcataatttttgatttttctttccttcttttaaggcttctcatttcttttggggattgtgggctttgattcaagccaaatactccactattgagtttgatttccttgggtaagttaaattttattatatgattacattggtctctgcttttgtttggattaacattaagaattcacagggaatattgtagttatttgcaatcaattataaaagttgtatacacttagtaattggtctgtgaagaaattgctataagctgttaagtgctcgcaggattagaaaagtgtccagtaggtggtgcaataaactaaaaatatgtcctttgaaaatcttaaactttaagaaaaccagcttagaggactgagtgaaaataagggaaggaccaagtttttcagctttgactaatttttttgttgttctcttttctcactaggtatgcaattgttcgttttaaccagtactttaaaatgaagcctgaggttactgcattaaaagtgcctgagtaaagaagagatttaattattctccagtagctgagcaatgcttgtgaatcttttcttaagaaatcccaaaaagccaatattagttaaaattctgttgtttaatttggttatcttgctttataaattatgcctctaaacaatcaaatctatttttgaaatagactgaatgatgtcaagaaatatacctactgctatccgtatgtggtggattagaaatgtgttaaatctgcaaaaggtataaagatgtcagtttaatttctttgataatttaacctatgttgtatgtgaattatttattataaacttagcacgattctgtgactgtttttctctgtttcacgttcgttgagtgtaagcaatgaaaatgtcccaaataagttttttaagttttactttaataagattaatttcagtaaacattctagttgttcagtgtaacctttttatcttgatgcattgtaagtaaaatgaatcatttactcttgaaatgccagtcattgactgatgtagataatttaggattttcatataaaaatagctgtttaggaaggtgaaatacattcactgtctctgttggtggtacatcttgttgaattcaatattagaaagtatttctttttggggtaatataacttagaattaaatccctgtttctctatgtagtctggcagtataaatataaatatttaccatataatcttggaataagtattagttaatgttaccaaaatctgtattaaataatgttttcaaatgctaaatatggtcgttactattttcagttttaaaaattttatagtatcaaattgtttctaaccaaaaatttccttttacttctagagatgctttatgtttttgattattaaatagtcactagtattgctaatttttgaaacaaatacacaaaatttatcatatgtagaaataagaaaatattgtttaggttaattattttttacctatccagagtcattccttacatttcagtttcatgtttcattcctcacattttagtttcatgttttagtttgattctatgtttttagactgatagcaaatgattacttgatacatgtaagttcagcgttatatgttgaggcagttatataattaaataaggaacacttagggcattgatcttgtacacttaaaatctgacaaatgacaaaatgtgaattaagcataaatagtcatggcaggagggcttttgtttatttctcttgtttttgtttaactgtatttttaattttgtctggtggtaagagggaggtaattattgtatggaaagaagttagatctttcagatagataaataggcttcaggttttgaagtctgctctgtgtagttgagcagtcatggttaactttacttagaaaattagtctgacaagctttgcacttcggtcacataagtgcccatgtacaaagttggcttactggatctgcatattcaaaatatgcaactacaaatttatcctctgagaaatcttctgaggagtctaatgtattccaaatgacttaatattctcagacaaatgctttaaaatacttggattatctcaagatttttgaagctaataaagtaaatagaaacacaggccattttaaatggtaaattctagttacataaatataatcttaaagtatgtttgtatctgtaacagtgttagaccagatttggtttctacctccccaatgttataaatgttcacttttgtttttataaaccatattactgtaagatcaatagaactttgcctagttaagtgaatggaaccaattaaacaactagtagctttttataatgttagtgtgaacttgaaaaattgtttttggtggaatttttgtctgtggttagaacattttcataaaacagataaagaatgtgtaatactcttaatttttttttttttttttttttttttttttgctttctgccttctaaagtgcaacagtatatatcttgtagaactgtgggaggagagaagataatttttctaccttactccatattcttacttcaaactattttgaatagaggttcactgagccattgctgatagactgtgcatagctactagctgtcacactattgtaggttttttggagagattcatagggaagtgaatgtaaccaggaataaaggctctcactttagctctgggactatgcagtggatcttgggaacaaaataagatatctaatctattttccccattctggctagattttggttgttgtgatgctcctacttcctgtataggtttttgggatcatggtgcaggctagtaataggattcagaattgcttcccttttatatcgaccatgtaagggattctaaaggagggtaaatctcaaagtgctctgaaatcatccctctaaaatctgtcctgtggtgtgctaagatgtctgttgcctttttatgttaagctaaggaacttgaatgccttacctaataactcaactagtagtaagctcattttgtaaatatgaaaatggctgtaagaagtggcattcatgtatattcaatgttagtcaatagaccatagtggcctggatgctttaacaagccaaattccgcaattttttttccttttttccccttcatacttgtatgatctcacctgaccagtgatttcttttcctcctaaccccatgctaccaccattttstggaaatcaaagagatgtggtagtaaatcatacagtacacacgatcatctgagatcaatatgagcacaaaactcatcaagtaggtctgcctggaatgtatataaaaaatgtaaataaaaatttgtaaattagtgtgaactgtatcttgcatatgagactgtgtattgttttgcattctcttcccttttgtagaaatttttctgtaaggaaatgattcagcttgttggttttagagtaaaaatagccaacagttgtggctacacagtgagatcacaggaactggaaatagggtttgtcggctttggttaatgtcagtactcatttatttagcctctcagtgcttaataagacttttctttattttttagttagccgttaggttttgtgaggttagattcctggaagcagtgaatttatacactgttatattaatagagctccgttctttgagtcatgattccaagctaaaggaaattaaaaatgtaatttaataatttcctatttttagggttgttaatttttttctacaaaaaaaccttgaaattttagatatcccaatgtgaatctaatttccatatatacagaaattagacaaataataagtctttagttcaacttaagcatatctcaaatgacttctctaaatttaaagttgatcatgataggatcataaaagacagaaaagacttaagtaatcttgtaatgacaattatttccatttttgctgaactaaaaatatttaacttcataaatatgttactacagcttccagatttaaagaaaaaaagtttcccccactctcaattaaaagttagaaccctccacttttaaaattatacaaatatttcttttttacattacacagaagccttctgtaccattttacgaatttctgtcttcataatataagtgaaaatactgtcatttcaattttctgctttaaattgtttttaataagcattccaaagtgatacagacttaagcttttaatcaatcagtcattcagttgatagacaaagttagcgatgctttatgctaggaaacttgttgacagtaacctgtgcgactttatgcagaagacaaatgctagtaattattatgcacagaggaaaaatcattttaagtatgtggtaaagcagcttcatctttcaaaattgatttgctctggtttttctttagtccattagattccagaatgtccttttactgggaatttagttatgtattaagataacctgttttcagttctttttgaaaagaagacattatttatattgaaccaccttattttaaaatttttaacttttatataccacttgtgtgattccagtgtcatgtcttgggtttgatgtcgttggacagaaaagtgtatcaattattttaaatgaatttttccccatgtttgaggcttagtctgtaaatgtgttgctgtaacagaaaatacttgggtatgcattacttgaatacttgaaaactgaaattaataagatgtattacataatgaattagatttctctgaacagtttttacactgaaaatcttcatttctggattgcagtttgaaatggaatgaagacctgaattatttgggtagaaaaaattatgatagtgcttataagaactgtaaactgttttaaactattttgtgtttgacgcatcaaacttcaagttttttgtaagtttctctcctgaaattttctttctcttctatactttatgcacttactatactactgatgtaataaaagagcagggttaaaaatattgtatctgtattcattgtgaatcctgtagcttttctagttaacaaaaaatcgctttctaaaatactcttaatcccattgttttggttaacatcttacccatttgttgtatttcaaatgccattaatcattttagtacaacacctatgtttataaaaatttgaaaacattacatattgtatttaaaactaattagtgaagagtaagaaaaaaactagccaacagaattgtaggtgatgcattagttaaatttcaaaactcataataaaggaactttcagagattggttgaaacccagtggtatccctgtaaattagctcctgtgactggaaaagaccccaaaaaggcagtagaggagattagtgtttacttgctgtggttgtggtgtgctgctacttaattataggtagtgacacactgaaattcttatttgtccaataatctgaagtagtttcctatatttatctgtactaaattgactataaattgagtctgcaaagaggaaactttttgactgtactgtatttaggagcctttgtacagcttggtcaaatttccatgatatgaagtatttgagttttaaaatatactgttattaaaaggaaaaagacatggccattattccatgtgcttaaatgataatttccttattcagtttcagaagaaaaagaatgaaattgggtaactgtcattgcgttagctttatgttgaattgggaaattgtggcataaagcttaaattcgtgtttatcaaatgtgaaccatagtagtataatgctgctttgtatataatgtaagtgctacaaatagtctcagcactgaaaatgtattgatacctcttaaatgaatgcaacttttgatgtaggtgttttgctatgcctcagaaaatatctgtctgagaatttgttaatctgtttgataatgaagatacttcctgttttcttgtttcatattttcatgttcaaaatttaagttttacatttttactactgttaatttaaataaaatttgttctgtggataaaatgaggttggcagtgaagaaaattaaaaacagcctcattcatgtaactggttaagtaaaaatacattttcactatgtgttcataaacttttaatgaagctgtttgtctttcagttcaaatataagtgatgtttaggctttatttctgttaataaggctttttaccattgattaaatgaaggaatgtatctttttgaagagatttatattctgtaaataaaaattcgttgtaacaataaagttgagttctaactacagtgtattcataaattttattgttacttcaacttatttttgaggttttccttgtgaatatctgcaaacacaagactttccaaagttagtgtataaatgtatatgtggagtgattctttgaattctagttttttgttttctgtttttttagttttatatacattaaaaagttttgaaaaaatgtttacttttggaaaaatttggttgagatgagactatggaatattacataacttataaacatttctgtttacctagtttaaaaattcattattcttctaactattatgctttgtgtcttcactattctttggaaccagagttgggaaacatagaggaataaagacactgtctgagacttagcatcttatggtctaggcagggattatccatttaaacaacaaactcttaaaattatcagatagtgtgatagatgatctctgccttcaggaaatgtttatttgccatgaagatcagttgtccataacaaaaatagtcattaatttgtgtttgtgtgtgtggtttttggtagaatgttttccagtttgggtttgtctgagactttctgatgattagcttgcagttatgtatccccaactggggataacatcaacaagttcctcatctcacagatgataccttaacaagtgatgtgttcttgttaaggtatcacatgtgagatgaggaacttgttgatgttaattttgatcacttggttgaagtattgttctgtgtcttcactgtatatttcccccttgcaacaaataggcagtctgtgggaaggtgctttagattgagtattttgttcccctacaaacatccactgttttcctcccctgatttagcaatacttgatgattcttacccaatccaatctttattacgatgattgtaaaatggtgttttaaaaatattgctatgttctccttttctcagcattttactgaaaggaattgtcctcttattggcatctaactacctacctacctacctacctatcaatcatctatcatctgtttgtattttaagtatagactcgtagatttctgttttattcagtggattataatctgctattaatactatatttattcatgtcattgttaaaattgtctgagattggtcttgagggagcccctcaaatctggttccttttgctatgttcccaacatgttttgagcgcttacttcctggcaaaagaagacattctagactcatcttgtaccttttctgcctc

SEQ ID NO: 95091 - DNA, 57176 bp, Homo sapiens
  misc_feature (1)...(57176): n = A,T,C or G
aggcaagcggccaagcacctttcctgaaatattgaggcctcagaacaagccccaggagaggtgccagcaccgtcatctctacccagataaggagacccaggtcctgagaggttaggcagctcggacaacaccacacagctggaggaggtcagactctgggttgcagaaggagaatgtgagcagaggccacaaaagagcgaggagccagtgcccagatgccgagatgccctcgccctcccagctcagccccaggaaccgagcccatggggagggaccgtcagggaaaggctgtcaggaagggcaggaggcggccctggagaggacggcgctgccctcaggggcaggaggggagtcccctccgctgagagcccccccacccccagtatccccgggggtgtccaggaggaggcggagggaggaagcgcagatggacaggactcccagatagggtggggaggtgtggccggtgacacacacggtcccctcctggcaggtgctgaagtcacctggagcctccaagcccgtggggcctgaggggcggggtcaggtcgggcacgcgtgggtgggcggagttctgcgccccgggccaaggcgcccgagttgaaccagtcagctcgggagagggaccgcggcgacctgtcccgggggcgtaagaaaaggtgggagggagtgcggctcgtgaacgggggcggcgatgggaaggaggtgcggcccttcgtcctgtcctcccaaacgtcgagtgaaaaacgaagcgggttctgcggcctcgcggcggagcagagcgtttcgggaagggcgggcccagcgtcctcgcgcccgaggtcgcccggcagctcccctgcgtccagaatccgccccccgcccgggcctgcgcccgcccctccgcctgagctccgcgcgggacgggccgggaggccggggtgggcgctaccttcgaaggcggtgggtccgccccgcgggaggtggaggggcgggaggggcggagccctctggtctccggagggtttggggatcgcagtcgcccctcccccatccagaccccgcggcgcaaagggcagtggcttttctggccagagcaggtggcgcgggcgtcgcaaagggtggtccccgaggccgcagcggtgtggggggagggcgcggtccccctcactccgggctccgccgtgtctggcccgcccccctccttcagcgccccctccagcccctgtgctgcactggcgcggggagcgccgggttcccggctggggctttggcagagggtcccaccctctccccgcctccccacgaaggctctggcggacccagatctcgggtcgccggacgccccagggaccccgcccgcacatcgcgagcgcgcccacccggtcgcgagcccacgcccgggtctgggagccaccctgcggcagtcgcgccctgcgtggcacgctgctcccccaggggcgaggcgcccccgcccgacgtcccggtcccgagcgctccccggcgcggcgcctcgcagcccagcgccccaccagccccgccggcgccgcagaccccagcctcgggcgggtcgggcccaggcttgcaacgcgcagggtaggagaagggaaattggcgtccgctgccggccgctgccccaggcgaggccagacgaggcctctgctcagatcccgccgccccacaaagcccgtggccccggagcctaccggaaatggtgctggccatggtgctggcggcggttgggcctgcggaggctggagaggcgcaagtggcggccggagctgcagacggctggtgctgcagtgccggggaggggaggggagaggagtggagggagcgagggcgggcgggaggcgggcgcggcgggagagagagagggagggagacagagggagagagagagagggttgggggaaggagcggggggaggagggagggagggttgggggaaggagagagagagagagagagactgcgggggcgggggaaggagggagggaggaagggagggaggaagagagagaggagcaagcgcctggctgcggaaggggccgcggctctcagggggagagggcggaggaggggggctacccgaactgcaacaagaccccccaccctccaaccgctcacagcgggacagctgcttctccaacttggctttgtgaggcctgagagtggggtgggggtggagatgagcccccattccccagggcaggcggggcaggggcaatgccggaggagcaggtcccacccatggggtggggccgcagagctcttcgccgccaaggccgctgtaggctgggctggcgccaacagggtccaggtctgtgcctgccatcggagaggatgccacagccacaggggtgggcgctggcctggaggcctccaaggggcatctcctgtgagcccaggggatgggcaggatctgagcggagaagagtgaaagtggaggagtgaggccagaacaaaggctttgccgtgaaagaggtggtttcccgcctgggctcagaccttcactcactgtgtggcccaggccaagggcaagcgtctgacctcgctgggcctttgtttctcaggggtaagatgaaacaatgatgcccccagacgatggagaggaggggtgccagggttgtgcgcacttagtgagtggggggcaacctatcctgcctccccctctcctcataactcccaaagggaaagcctggtaggcaaacggagcgtctttgccattgcagggatgaagccaccgaggcagggagaaaagtgctttgccctacaagcaactaagtcatagggccaggagcaaaaccctgaaaacctcaggagacttgcagagccatgaggctggctcagcaacacaaaagccaggggcaagcctcagctctagcagtgcggtgggagcacccaaggccagtcacatcctagggtggcctggagagtcctgacccctgacgtgcaagccggcatcatccccgggactgtgagtctggtgggggtgatgcccaggaatgtgacattgtgtggcccagaggtacccttaagactggaggatcaccaggcgggccctgacctcatcacaggagccctttaaaagcagtttcctttgcctggttgaagaaatcggagggatcaaaccaaagaaggttttctgttgttgagatgagggggccacgtggcaaggatctgagaactgctcccagccaacagccagcaagacaacaagaccttaactgcaaggaagtgagttctgccaacaagaagagaatgggcttggaggcaggtttgaccccagggcctccacacaagaactgagcccaactgcccacttggtttcagccttgggttactaagaattaggaggtaatgaatgagagttgttttaagctgttggttttgtggtgatttgctatgaagccatatcaaactaatatacacacagaggtgttggcccctgggccattcctaggaagccagctctgcgaaggaggaagaagggcagagaggcacacagagctgcccaccacagcagctgtgtcctccctgttggccaccacagtagcagttggggatggtcagcatccttcaggcagactccagccccgggtgctggagctcaggtgctagggatcaagagaagtagccctctctgggacctccagagtcttctcatgtgggtggggtaggacccacccagtcaggctcagagcaccgcaatgcctcacactcattgtgactctggccaggccctctctgagcctctgtgtcctcatctggagcacagggaccaggtgtgtggaagcccgtggcatagtgccaggaacacagtagatgtgcacagtgtgcactagcaggaacacacaacaggggtactgactgtcagcacctaggcaggcacacgcaatggggtactgactgtcagccatactgactgtcagcgtgctagcaggcatacacaacagctgtactgacagcacactagcaggcacatgccataggtgtactgactctcagtgcactggcaggcacacgcaataggagtaatgacagcatgctggcaggcacacaatagctgtactgactgtttgccccaatatagtgccaggtcttggagcagattttgacttctcaccaagatcaaatgcagaaagtgcacgagcatttcaaagatgtttttcacatgcacattagtgctagttaaaaaaatgttttgactgggtgcagtggctcacaactgtaatcccaacactttggggggccgaggtgggcagatcacctgaggtcaggagtttgagaccagcctggccaacatggtgaaaccccatctaccctaaaaatacaaaaattagccaggtgtggtggcaggtgcctgtaatctcagctactttggaggctgaagcaggagaatcacttgaatccaggaggcagaggttgcagtgagccgagatcccaccactgcactccagcctgggcaacaatatcaagactccacctcaaaaaaaaaaatgtttttcataaagtgtgacttttatcagacctctgcattcttgaaattaactctggcttggctgggcgtggtggcccacacctgtaatcttaacactttgggaggctgaggtgggcagatcacgaggtcaggagttcaagaccagcctgaccaacatgatgaaaccccatctctactaaaaatacaaaaattagccgggcgtggtggcatgcacctgtaatcccagctactcaggaggctgaggcaggagaatcgcttgaacccaggaggtggaggttgcagggagccgagatcgcaccactctattccagcctgggcgacagagcaagactctgtctcaaaaaaaaaaaagaaagaaagaaattaactctggctcctagaaggagccctatatctcagcaggacactcagtcattcaacagacatctgtcaagcacctgctgtatgctggagctgtgggtacgtcagcaattagaggaagagggcaggggtacaggagttcctgaccaccccaggccagcacgctcctatagcagctggcaaggagcagatgactcagacttcagctcagtccacaggacagccttttctggccactgctctcaggagatgagatgtgtggctgcaaaaggtaaactcctggctcctgagcaggctctgggcaatctgctcaacgctctgtgcctcactttctcacccagaaagtgtggacaatgagaggacttatctggctgggcgcggtggctcacgcctgtaatcccagcactttgggaggccgaggcgggtggatcacctgaggtcaggagttcaagacctgcctggccaacacggtcaaactccatctctactaaaaatataaaaaattagccgggcttagtggtgcacacctgtaatcccagctacttgagaggctgaggcaggagaatcacttgaacccaggaggtggaggttgcagtgagccaagattgtgccactgcactccagcctgggcaaaaagccaaaactctgtctcaaagaaaaaagaatcatggcagaaggtgaagtctatgttagtcccagttcccaggtcgtacatggcggcaggagaaagagagagagaaggggaaactgccacttttaaaccatcgggtctcctgagcactcactgtcagaacagcctggaggaaactgaccgcatgatccaaccacctccctccaggtccctccctccacacgtggggattacaattcgaggtgagacttgggtggagacacagagccgaaccatatcagcatgtatggggggcactgaaacttgtgcttggtgcccattcattcaacgagtgtgtgtggctggtctcctcatcttcaactccctgccgagtctcagataggcagcctgcagttccttcaccacaacaggcacatggggctgggtgccagtgagtgctggggcttctccgagcactatctcacacccaggagcgtgggcacgcatggcattcgcatgtgccgtcagtggacattaaacacagccatgaagaagccacgaagaagtgctgcctgccggccgtgcgcggtcacgcagcgccaactccctcctggggccttctggggccttctggggcatgggagctggggccgcctgagacaaacatccgtgacgctgggctgaccccacagaacggtgcgggcctcgctcttggagtcagccctgctgccagccagtgccgggtgctggggactcagggaggcccgccgggaccactgcgggacagtgagccgagcagaagctggaacgcaggagaggaaggagagggggcggtcagggctctcaggagccgggtcctgggcaaggcgcagccgttttcaaattttcaggaaagcggtcggctcacactcgagcagtaaaaagatgcctctggggaggaggcccgtgcagctctccgggcaatggtggtggctcggcctagagaggcggtagtggaacgcagaccctggtgggggaatgacatcaagggaggagacgggcgggaccccagatttctgcctgtgggcgatggaagtgaggttcactggccagcggagccggacacagaacgcgcaaaacgccgtgtaggcctggaggagcmgaagagcaggcggaccccctccgcgsgggaacagtttccgccgggagcacaaagcaacggaccggaagtggggggcggaagtgcagtgggctcagcgccgactgcgcgcctctgcccgcgaaaactctgagctggctgacagctggggacgggtggcggccctcgactggagtcggttgagttcctgagggaccccggttctggaaggttcgccgcggagacaagtgagcagtgagtcgcagtgaccctacaagtggttcttttacccgagcggctcgtaggcgcgttgcggtttttcgaaactacagctcccggcaggccccaagccgccctcggggccgcgggtcggcggattggccgcgctgcattttgggacctgtagtttcctgcgctcgtggcgctggcgccgcggcgttggctgagcccttgaccggggctggagggaagggccgacattcagtgtgtccgcgtctgttctgttagtcccagttcccgggcgggattgaggcttagagaagttgagtgatttgctgagggctgcacgggttggcatcccggcatgctctttcgctactttggctgcatctggttgcccacccgggcgnatggggaatggactccagccagccaggagggcagagggctggagaggcagggccggaggttcagaccctccgctctgacgttgcgcctggtgaggccgggaggggtgccgcttgcctcttcagccctcacgctcttgtggaagtcgcggaattactgcaggcggaacttgcagcactgtgrgcgtcttttccagagaaggacggagttgtggggcgggaggataaggcaaggcccagccacttcgcatcttcgccccgccagctcctcgagatgggatataccagggttgctctccaaccctctccgcaggagggactgatggaaacgcctgggaaagtagcccggtacccacaaaggctgtctacaaacagagtcttactgtctttcccaggtctgtgccatagggattctcgaagagaacagcgttgtgtcccagtgcacatgctcgcatcgcttaccaggagtgccygagaccctaagatgttcggagtggttttttcgcmcagacccgaatagcctgcccctcagccacgctctgtgcccttctgagaacaggctgatatgcccaagatagtcctgaatggtgtgaccgtagacttccctttccagccctacaaatgccaacaggagtacatgaccaaggtcctggaatgtctgcagcaggtagagcacaggccccgaggaaaggactgcgggtgggtggagcttcagccaggacggggtgtgcttccctctcccggcccattccagccaggcccctccgggccagaggcagcgtctgtcataaaaagggctggtgttccaggtggggtcagagagaggattgacaagtaaaaacgatcgtcctttgaagggggccggcccctccacacctgtgggtatttctcatcaggcgggacgagagactgagaaaatgaataagacacagagacaaagtatagagagaaaagtgggcccaggggaccggcgctcagcatacagaggacctgcaccggcaccagtctctgagtttcctcagtattcattaattactattttcactatctcagcaagaggaatgcggcaggacagcaaggtgatagtggggagaaggtcagcaagaaaacgtgagcaaaggaatctgggtcacaaataagttcaagggaaggtactatgcctggatgtgcacgtaggctagttttatgcttttctccacccaaacatctcggtggagtaaagagtaacagagcagcattgctgccaayatgtctcgcctcctgccacagggcggcttttctcctatctcagaattgaacaaatgtacaatcgggttttataccgaaacattcagttcccaggggcaggcaggagacagtggccttcctctatctcgactgcaagaggctttcctcttttactaatcctsagcacagacccttcacgggtgttgggctgggggactgtcaggtctttcccatcccacgaggccatatttcagactatcacatggagagaaaccttgggcaatacccggctttccagggcagaggtccctgcggctttccgcagtgcatcgtgcccctggtttatcgagactggagaatggcgatgacttttaccaagcatactgcctgtaaacatattgttaacaaggcaygttctgcacagctctagatcccttaaaccttgattccatacaacacatgtttctgtgagctcaaggctggggcaaagttacagattaacagcatcttagggcaaagcaattgttcagggtacaggtcaaaatggagtgkgttatgtcttccctttctacatagacacagtaacagtctgatctctcttttccctacagtccttgagggtgacagacttaggagtgccttgggggcctctctgaggagcagctgatattcacgggtcaggaggaagcatttccattagaggggcagccggtggccagcctcacttggaaggtctttgaacctcgggggtgcagggaggtggcagtggtgcaggttgccttctcctgggttccttgaggtgccctcttgtacccggctcacacccttcccctccccgagtttcctgctcaggttcccgtctgagagcttgtatgtaggacgtcagataggacagcataaatgtttggatccagaaacgcagaacagtttcctattttgagacttgacacctaattagtcatcttactatttaagctgaaaaatagtgtcgtgttttgggtaacgttctgcaaatcgtttgctaatggcggctgagttgcttcacgccctttagggcaagagtgggacttgcctgtggacttctccgcggtcccacagggctctcgccacctggcagtggcctctgcatctgcaaagagctgcccgctggctgccgaagcttgtctcagggcagcttgtgtggcctcgcctcttcctggcttccccgtaacccttgctccgaactccrttcagaaggtgaatggcatcctggagagccctacgggtacagggaagacgctgtgcctgctgtgcaccacgctggcctggcgagaacacctccgagacggcatctctgccckcaagattgccgagagggcgcaaggagagcttttcccggatcgggccttgtcatcctggggcaacgctgctgctgctgctggagaccccataggtgaccctagttcccaggcctctcctggcctcctgtggggatggttggcaagggatggcgctgagggtggggtgggcccatggggactcctgccgtctctcaagcagaactcaaggagaattttttagctgctgtataatttctcgccatcgtgggtgtaaacctagggttgggcttttttgctgaattagggcacggcagatgcccacttcacccatttttgataaaccagtatctggggtgtcagattcttggctgtctgcagggccgagttagccgaatgccacctgcctttgatacgtgagaacgttgtctgagaaccgtgacttctgtgcttgcttgtgtctggtcagcttgctacacggacatcccaaagattatttacgcctccaggacccactcgcaactcacacaggtcatcarygagcttcggaacacctcctaccggtgggtcagacgagtttacacctgtctcggggtcctcaagagaaccagcttggcatggtgctgagtccacagccccatgctgtgctgtggtggagggtggtggtctttctagacgctcccccgaagtgtgcagagcgctggtgcccaggggtggggtgcggccygggctgcctccaatgcccattacttgtgaggaagcagctttgcatctgtgtgctgaccttgggcgggcgtcctgagctcctcgcaggtgctgttgtagcagctgtgcagtaggtcagggctggcccccagtgcagctttgcacatgaagtaggaggaggccctgctgcttgtcagagcccagcagagtcttggtgttctgtcgggttcctgtggccggaccagtggcagggtgctgtggaagctgtcgaatctcctccctctgtccagtacccccgctcgtcttctagctccctcctacgcccgggccacgtttcagttatgctcacttcctctgaccgccgaggctcctgcgtgtctccatacagctcacgctgcagggccacgctgtgggtgttggagacagctcctcctcgacccacggtgctctctcccaccaggcctaaggtgtgtgtgctgggctcccgggagcagctgtgcatccatcctgaggtgaagaaacaagagagtaaccatctacaggtaggctcctgggctcccrctccggctcagtgtcngacaggcragtgctgctgggtgtccagagmcccaggctgcgctcccrctgggctagggtttgaagttcactgggggacygcaggggaggacctggtgggggtggggactggcttcggtcctttcttggccgtgcttcagctgcgcactctgcccttcctcccacagatccacttgtgccgtaagaaggtggcaagtcgctcctgtcatttctacaacaacgtagaaggtacaagcagctgggtgggaccagggtcgggttggagtgtgtgcagcctctcagggtggagctcagtggtgtcacagcctggttgtgcttgcccggtggggcggccagtgcggccatgtacctgggccctgtcttctgactcggggccacccatgttagacttctgtgtggaagagctcacacagtggtctgagacagccagccggcaagactgcctctggctggtgcctggggccttggattttgggaaggctccctccatttcctgatgagagggtctccctgcacctaacctgctggtgcaaacagtaggggttttgctgaacaccggctttctcttcggggactttgttgcttgcccagcagcaggtgctccagtgaccggccctcataccatcttgggagggtgtcctggaagccgtgtctggcctcccgcgaccctgccccgtgtgtctttttcctgtgctgaccttgctgcggaaaattatggccctgagtgtgactccaggctgagtcctgtgggtccaacacgggatgccttggggcctcttctggagacgggatgtgagtgacaggagccggccggggcagcttgccctgtgactgcacgtggccacagcctgtgagggccgggggtgcttctccacccacgtggctgcccctcgggtatgtcaagggcttctggggctcatcacggggtcctagagacagtggcagggtgcacccccgttggctgcccttacagtttctgtgacctgagggtggcatctgtgcagtcggcgcggtctgtgcttctgtgggatcagggttccctctgtttcctgcctcagttggggctcaagcctcaggtgaggtggccccggagcactcagaaggcatcggcggtcctgtgggctgctttctgcactcacgtttgctgagtgctcagtgtgccaggactgaggaccctgaagctgctcttgtatttagggcggcgctcccctggcagagactgagccrggtggtcccgcatgacccactaccaggcgtttctgggccctggcccttggagggacagggtgggcggaacatgggcctgcagggaggctcccgcttactggaggcatgtgctgtgttgctggagacatcctctgtgttgcttcttgttcgctgtggtttttggtctggtggcaccaaggaccctcagtcatcttgatgtgtggttgtccaggcctttttgwtggtcctaagaaggggctctgcctttgtgcccccaggttccctgacaggagctgccggctcgtcccggtgatgcctgcaggacgtgactctgggacggggggttgggcagatgtgctgatggaaattctcaagcaggcgtcatttccgaggtcctcacctggatttccaggacaggagtgcctgctgggtgtccccagtcccatgcagcgggggtccttgggatagcatggaacgctgrgcatgggcctggccggccgtggtcctggacaagggcagtgccccggtggctgctgggcctgggacctggtggggacgctgggcctggtacctggtggggatgctgggcctgggacctggtggggaggcctctgactgcctcctggtgctgcttccgtctgtgttaggcctctgggtattggggcccccatctgtctcctcctccaggcctgtggactcagaccaggaagacacaggccagcycctgcctgtcccccttggcttgggctctcactgcccgacctggcgggaggttgcctagccgtgaaccttcgcaccctgtctgccaccggacaggctgtgagggggtgtctgcagcacctgcaccggcctgagcatcttcagagtgggctgcagctcctggaggggtctgagaggaagggaggcaggtattttgggcgaatgaggagacagctggagagctggcacccttcctggcctgcgtcctgtgaggactctggttggggacagcaagcttggggtcagcctggggcagagcctctgggacggccccgcccctcgtgccccttcccctcgcagctcctgtcctcgccccgccctcagctctccgccaggcaaggtttggcaagtgccgctgtgcggcagtgcctgctgattggctggtctgttgctatggtgctgcccaggggtgtgcttttcctcccctgccttccctgctatccctgggagtatctggggttgggtcatcgctggtgtgtgtgagtgtgtgtgtgtgtgtatgtgcacgtgtgcatatgtgtgcgcttctggcctctgcagctgagtcctggccctcggggggcctggcacctcctggggacaggcacaaagcagccatgatggagtcgggagctgggggaggccccattgccccacgtggctgccctgtgactctggggtgcttgttagaagaggtatctggttctgtctgtgtttaagcaactccctaaggaattcttgtggttccagtttggggggcctgtactgtagaggcaagggaggggcaggacatcccccagactctgacttctgaagccttttctgcccggggcctctccgccagtacaggcagtgtcctttgccagggctgccatgctgcagaggggagtgggccactgtttagcccaggaaaacctggctctcccttagctggaagttctgggcctgttgtggttggcagggaagctgagtgacggtgctaatcacaggggcacctgcaggggtttgtgggagatgcctctgtgggttggggcrataggctgaggggctgttcttccctgccctgaggagggctgagtgtagccgccactcctgtcctgtcttgggctgtctcggagaggatgcgtagaaccctcgggatcctgctggcctccgtctggtccaccctgaacctcaggccttctgggggcagaggaggattccctcaggatcactcgggtgggggcctctcttgggcacctgagaccctcagtgggtgctttgtggcgcgttcacggttggtgggggacgcccagccctgcccgccgtgtaggagccgttctgtcctgggcatccccctgtggtctgggacttagtggaccctgagggtgtgtgtttacccctgcctcacacctgcagaaaaaagcctggagcaggagctggccagccccatcctggacattgaggacttggtcaagagcggaagcaagcacaggtgagacccctcagtgaggccacgaccactgtccttccatggcccagctctcctgtgacctgtggaggcccggatatatttcttcacttttctttgttcctttttaaattatgaaactaaccaccattcagtacgaaaaagtttaagcagctctgaggaagatagagtaaaaaattgtctccctcttccctggccctcagccatccccggtggccaccgtggagtgtggacggagccctgcaggcctgtgtctgtgcggaagcacgcgcagttttgtctgcacagactgtcctgcagttggctgttttcactcagcgttgtgggtatagcttcccatgctggtgctggcagctcggccttgttcttttgaggacagcagatgtctcctatgtctacctcttacagcttcagagattcaagttataataaagctcttcttatattgagggggaaacctccctcccccttttttttgaaacagggtctcgctctgctacccaggctgcagtgcagtgtcacagtcttggctcactgcagcctcagcctcccaggctcaagcgattttcccacctcagcctcccaagtagccgggactgcaggcacrcaccaccatgcctggttaatttttgtattttttgtacagacagggtctcactctgttgctcaggccagtctcctgagctcgagagttccacctgccttggcctcccaaagtgctgggattacaggcgtgagaccccatgcctggccagctctttttttttttttttttttttttgagacggagtctcgctctgtcgcccaggctggagtgcagtggtgcgatctcggctcactgcaagctccgcctcccgagttcacgccattctcctgcctcagcctcccgagtagctgggactacaggtgcccgccaccacgtctggctaattttctgtatttttagtagagacggggtttcaccgtgttagccargatggtctcgatcttctgaccttgtgatccgcccacctcggcctcccaaagtgctgggattacaggagtgagccaccgcgcccggcccagctctgctttttcttagtggttctgcgttgtgtttgtttctatccaggaatagggttggttttacttttccatcgagtttttaaagagacgacgatttacatggtcggaaactcacgaggactccccatcccttggtcggaaactcacatggactccccatcccttggtcagaaactcacgtggactcccatccatcccaggcagcagcttcccacctgggccctacgtgcaggatgagggctccttccgggtcagaagacatggcggcctcggggcaccgtcccctgcatgrggtgctcacaggatcttctcctctctccttcccagggtgtgcccttactacctgtcccggaacctgaagcagcaagccgacatcatattcatgccgtacaattacttgttggatgccaaggtgggggctcagtcctgtagctgacgactcctgatgtccaggggtgtccctgggcttgggaacagctgtccgagcctttgctgcttcagggccttagatcagcaggcctgggtgggaggactcacctctgtcactgggcaggggctcaacctggccagacacacttgtgagcagccccaggccacaggtcagttttctgagcagtctgggagcgggcaggctggtgggagtgaggagagacctccaggctgtggtccataggccagtgcccgctcttgatcctgacagctcaggttctctccttcacgtcaggccatgggaggcaccgagaacacaggaagcccactgactcccctcttcccagcgcgtgcccggccccacactcactccccctcccagcatgtgcccggcttcacactcactcccctcttcccagtgcatgcccggccccacactcactccccccacagcatgtgcccggcctgacactcactcccctcctcccagtgtgtgcccagccccactcccttccgccccgtgtgcccagccccacgctcactccccccgccagcatgtgcccggccccacactcaactcccctcctcccagtgtgtgcccggccctgctgccctcctccccatgtgccctgcttttgtgccccacactttttacttagtgcaggtgggatcacacgccacgggtcaatggtttgtgtgttcacgtgacgatggcgtggtgacgtttccagatcccgtcgttggttcgctcattctcggggtgtatatttattgagagctcatcatgctgggtgctattccaggcatagcaagactggcttcactcacatggagctttgattctagtggtggggacaggtggacagcaaaagagtaagcacgtgagctgaygatactgaagggaaatagagcagagggaggaggcggagaccgagccaagcgggcccaagtgcgatgtcggcgggaggtggggaatgctggtgggtctgaggggagcctcagcaggtgcagcagagcaagggaagaggtgagtgggggcggctggggggccgactcctgggaagctgtagcagaaccccacagagagctggtgaggtttgccgtggttgtgggtgactcggtgctttgagccctggctgcccctgggaaccatctggagagcttctaacccaaccaggcccctccctgggacagttatatcacagctggtaagccgagtctaacactttcacggaaacgcagaagatctaaaacagcaagatgaccgtgaagaagaacagagctggaggactcacctcgctggtttcaagactcctctaaagctgcaggagtggaggtggagatggcccagctcaggcacaggcctgcaggccatggagaaggcagcaagctcaagctgacccacacgcatgtggtcattgttttttttttcagttggaatctcactctgtcacccaggttggagtgcagtggcaccatctcggctcactgcagcccccgcccctaggttctagcgattctcccacatcagcctcccgagtagctgggattacaggcgtgcgccaccatgcctggcccttggtgattgttttttgacaaacatgccaatttaattgagagaggaaatgaaggttgatttctggttttctgaaaaaatggtgctaagaacagctggatatctgttcggaaaacagtgaatcttaactcttgttttaccctgtataaacctaaatgtaaaagctaaactaaaagttatagaaaggaacatgggggaggtctttgcaactttggggtaggcagagatttcttagtatggatacacaaggcactagccatgaagaaaaacattaaaatttagacttcaccaaaatttaaagcttcaactctktggaagagttgagaaaatgaaaaagcagttaaagaaagggagaaaatacttctttcaaaggacttaaaaaattttttcagccctcctctgatttgaaaggacctttgaccagagtatgtaaaattctcccataactaagcaaacaacccacttaaccactgggaagggatctggacagacgtttcaccaagatgggtrgaatggccagttaaccactgggagagcatccggacagacgtttcgccaagatgggtggaatggccagttaaccactgggagagcatccggacagacgtttcgccaagatgggtggaatggccagttaaccactgggagagcatccggacagacgtttcgccaagatgggtggaatggccagttaaccactgggagagcatccggacagacgtttcgccaagatgggtggaatggccagttaaccactgggagagcatccggacagacgtttcgccaagatgggtggaatggccagttaaccactgggagagcatccggacagacgtttcgccaagatgggtggaatggccagttaaccactgggagagcatccggacagacgtttcgccaagatgggtggaatggccagttaaccactgggagagcatccggacagacgtttcgccaagatgggtggaatggccagttaaccactgggagagcatccggacagacgtttcrccaaggtggatggaatgaccagttgagcacatggaaagtcgcccagcatctccagtcataggagaaggcagattaaagccacggggagccgacactgtggtcccactggcatggctgaaattcagaagccctgagtgtggcatgaggatgtggaacagctggatctcatccatcgctgtgaagttgtgtagccactccacaaacgtgtggcaaacagccgagccgggagaagggaagacgtgttcaaagattcatatgtggccaggctcagtggctcacgcctgtaatcccagaactttaggggccaaggctgggggatcgcttaagcccaggagtttgagaccagcctaggcaacatagggagaccccatctcaaaaaaaaaaaaaaagaaaaaagaaaagacttcagtgtgcaggtttaccagagttttgtttgcagttgccaaaactgggaagcagcccgcgtgagcccatccacaggtgaatggacagaccgtggtacccgaacactaacagcagccacgggcgtggactgtggtcacacagcagcagggagccgatgagtctcggacatgctaacccagagaggcccattgaggaggacctactgttttttgtgtttttgttttttgttttgaaatggagtctcgctctgtggtgcaggctggagtgcagtggtgtggtcttggctcactgcagcttccgcctcttgggttcaaacagttctcctgcctcagccttccragtagctgggactacaggcacccgccaccacacccggctaatttttgtattttcagtagagacggcagttcgccatgttggccaggctggtcccaaactcctgaccttgtsatccactcactttggcctcccaaagtgctgaggttgcaggcatgaaccaccgcacccggctggacctactgttttattccatttatgtgacactctattaatagaaaaggcaggggtggggctggtggttatatggtgcacataactgccagaactcagtacacttaaaatgaacatcttaatgtgtgaaatttttttttttgagacggggtcttgctctgtcacccaggctagagtgcagtggtgcgatctccactcactgcaagctctgcctcctgggttcacgccattctcctgcctcagcctcccgagtagctgggactacaggcgcccgccaccacgcctggctaattttttttttttttttgtatttttagtagagacggggtttcacagtgttcgccaggctggtctcgatctcctgacctcgtgatccgcctgcctcggcctccgaaagtgctgggcttgcaggcgtgagccaccatgcccggccaatgtgtgaaaatttaaaagtaccaaagctggaccccaccccagattgctcccatgacactctgtgggtgggacctgggagttgggttttgttttgttttgttttgtttttgagatgaagtctcactctgtcgcctaggctggagtgcagtgacacaatctcggctcacattaacctctgcctcccagatgaaagcgattctcctgcctcagccttctgagtagctgggattacaggcacacaccaccaccccctgctaatttttgtatttttagtagagacggggttttaccatgttggccaggctggtcttgaactcctgacctcgtgatccgcccgcctcggcctcccaaagtgctgggattacaggcgtgagccaccgcgcctggctgggagttgggtttgtaaatctccctgagtggggctggggcagggaactgctgggtctgggtcttcctggctcctctggtctgtggcttcctgactgcggtggccgggggctcccagggcatcgtggccgtctgtcttgctgagcgtggcacgtgcctttccatgctgtggaggagcgtctcccggtatggcgaactgctggttagggtggggcggtgttgccaggtcatccaggtctggcctctgctctcgacatcgccrgcgctgttkctcatctgcgcttgtgatgttcgatgcctgctgcacatgtcttggcttccctctttcccggcctctgtgagctccagcgctgcgtcccttctcttcctcctgtagagccgcagagcacacaacattgacctgaaggggacagtcgtgatctttgacgaagctcacaacgtggtgagtctccgctggcctcctaaacacctcctattgcttctggcctttttgtcaagagccacgcaaacctttctggaggggctctskccaaactcctgaagccctaggtgcccaggactggggactgagcacaccaggagcttctgccaccccctcccrccctgatccgatgcctctgctggggctggagactggccagctggsccagggacctgcccgtcaggcgcagggcccccacaggccgctcaccagaccctttccctccagccagctcggggtcagcctgggccagggctgtctcctctgccctcggcagcagcaggcttgtggtcttgcctgcagtgtctctgcccttccggccacatggcttgagactgaggcaggagaatcgcttgaaccttggaggcagaggctgcagtgagccaggatcacaccactgcattccagcctgggtgacaaagcgggattctgtgtcaaaaaaaaaaatgttgactgggcgcgctagctcatgcctataatcccagcactttgggaggctgaggtgggcggatcacgaggtcaagagatcaagaccatcctggccaacatagtgaaacaccgtctctactaaaaatacaaaaaaattagctgggcgtggtggcgtgtgcctatagtcccagctactcaggaggctgaggcaggagaatcactcgaacccaggaggtagaggttgcaatgagccaagatcacaccactgtactccagcctggtgacagagcaagactccgtctcaaaaaaaataaaatcaaaaagaataattggcaattccagtgaaataattgtttgtttgtttgttgagacagggtctccttctgtcgtccaggctggagttcagtggtatgatcttggcccactgcaacctccacctcctgggctcaagccatcctcccacctcagcctcccgagtagccgggactacaggtgcacaccaccacgcccggctaatttttgtattttttgtagaggcggggtttcccagcgttgcccaggctggtcttgaacccctgagctcaagtgatctgcccaccttggcctcccaaagtgctgggattacaggtgtgagccaccgcgcccggcctgaaacaatcgtttctaaatattggtgtgggccacacagtcatgtttggacctacttgtggccttttacagaccccaggccaaggctttgggaacttggctgtcagcctcctgtgccttctgcacccccaccccatttctgctttctggaacccccgatcctgtcctgttctgtggtgattcrggtgtgcttgggctctaggagaagatgtgtgaagaatcggcatcctttgacctgactccccatgacctggcttcaggactggacgtcatagaccaggtgctggaggagcagaccaaggcagcgcagcagggtgagccccacccggagttcagcgcggactcccccagcccaggtgcgttcatagccagactgcttggtcctgaggcctgcgctgctgcagggtgagccccacccggagttcagcacggactcccccagcccaggtgcgttcatagccaggctgcttggtcctgaggcccrygctactgcagtgggcagcctgccctgtggctgtgtgtggtcggcctgggcaccatctattcaggctggcactgcagggcatccgcttctctcagaggcttcttgggtgtgaattcttcagggtcctgtagcctgtggaagggctggtattgttcagtagttctggtattttccaaagacctatgtcttctcccagccagtatcaacttggcctctactgtgtaaaactggaaaactctactttgtgaagctgagttgggagcatcgcttgaggccaggagtttgagaccagcctgggcaacatggcggaacctcgcccctgccaaaaaattagccaggtgtggtggtgtgctcctgtggtccaagcttttcyggaggccgaagtgggaggcgtgcttgagcctgggaggcagagcttccggtgccccagatgactccactgcactccagcctgggcggcagagtgaggccatctcaaaaaaaaaaaaaaggaaaactaaatatattcactgtaagggcattttgcatctttaaatgacccacaaatctggcatgcatcagctgctctgcctgtaggttccttcccagtgtttgtccagaggtgtatttccacacagcgctagtcacggcataygtggaaaacgtggaaacccttcatggatgttgtcagttggtctatattttctttcttttttttttttttgagatggagtttcacttttgttgcccaggctggagtgcaatggcgcgatcttggctcactgcaacctccgcctcctgggttcaagcaattctcctgcctcagcctcccaagtagctgggatcacaggcgtgcrccaccacgcccagctaattttgtatttttagtagagatggtttctccgtgttggccaggctggtctcgaactcctgacctcacgtgatccacccgcttcggcctcccaaagtgctgggattacaggcgtgagccgccacgcccggcctttgtccatattttctacatggcttctgtaaacagctgactaggagtctgtgtgaatatcttcataggttctgctgtgacactacttgctcgtgagcatctccaggtgtaaacagcatcagcttcccccattttcctttaaaatcgcacatgtggacggacaccacggggaccctggaccctggggagccccgtcctcacccttctcaccaggatggctgcttggtagagagtgagtttgcaaagttggcatttgtttagtacagaagttatcaggtgttctggctttagaatccctttatatatatatatatatacatatatttaagtgacagggtctcactctgttgcccaggctggaatgtggtggtacaatcaaagttccctgtagcctcggcctcctgggctcatgggatcttcccgtctcagcgtcttaaagcgccgggaccacaggtgtgcaccactgccaccggctctcaagattgccacgcagggagttgcagtgggggaaggggttcctgggactttgaacgctccacctccctcctctccacagtcccccaaccccacctctctaacggggtggacggccgcctctttccatccttcgcttggcgcagggtggggagagtgacaggtctccttccctcatctcggcagctgccatttcatcgcttacataacgtgggagaaacatccacccacccccaggcctgtgtgaacatcaccacggggccttctccactcttcagttttgttagttacttgatgtgcagggctttttgttgtaactagtgggggacgtgtggtggggtgggcttctgccatctcattcaggaccagaacttcagttttcatccctatctgttcccccacccctttggagatggggtctcactctgtcacccaggctggagagcggtggtgccatcacggctcactgcagcctccacctcctgcrgcctccacctcttgggctcaagtgatcctcctgcctcggcctcccaagctcctgggactacaggcgtgtgccactgtgcttggcagggtccattcttttcctcacactttatttattgaagagcccaggccgtttaccctgcagagtcggaatctgtacaggaggggcagccacacgagttccccggtttactctgaacttaggtggcttgagggccccagttagactgcggccaccgtttgcygggctccagatgggacgtcctttctatcagaaggctcacagtatctcctttcccgtttcttcccatgtgaacattgttgctgctgaacacctgaatatgttaatcactgggggcttgcaagatggcagtgtgctaattccatcatctagtcagttagcaggaataacttaggaccacgccctgcaccatatcagctatgtggtgatcccattcacacaggaaaggtgggacaaatgctgggggtgggccgggtgtgctgtctcacacctgtcatcccagcactttgggaggcccaggcaggcggatcacgaggtcagagattgagaccatcctggccaacacggtgaaaccccgtctctactaaaaatacaaaaaaattagccaggtgtggtggtgcatgcttgtaatcccagctacttgggaggctgaggcaggagaatcacttgaacccaggaggcggaggttgcagtgagccgagatcgcaccattgcactccagcctggcracagagcgagactccgtctcaaaaatcaatcagtcaatcaagtgtcatcactgaatgtttgtgtgtgaacgtggggattggtcctgccccatgctccctcctgaatctcactcctgacctcagttgctgcaccttgaggtgttttctgtgggctcttgtgtcctgaccccggcggttgtggcctctttgctgtctgggagtcaggatttttcacactcatgtcctgctccagacctggaatcagccaagtctccaagaagccctgctttcttttcctgcaagacggtatttcaagacccgccrtgcggcagcgggttggtcatggttactgggttggtcgttgtkactgggtgttttcgtggagatacagccatacgcacaggtgtgttcacaaatgttaattctaaaggtcaaacacccggccaggcataagggctcagcggtaatcccagcactttgggagaccaagactggtggatcacctgaggtcaggagtttaagaccagcctgagcaacagggtgaaaccccatctctactaaaaatgcgaaaattagccgggcatggtggcgcacacctatagtcccagctagtcgggagacagacacgagaattgcttgaacctgggacatggaggttgcagtgagcagagatggcgctgctgcacccctgcctgggtgacagagtgacaccctgtctcaaaaatgaatagataaataaagataaaacacctgctcctcttggtgtctccagtttggatttggcctgtgtagcctcttccttcgcctgttggtggatttggcctgcacggattctgtgtggcctcttccttcccctgttggtggatttggcctgcacggattctgtgtggcctcttccttcccctgttggtggatttggcctgcacggattctgtgtggcctcttccttcccctgttggtggatttggcctgcacggattctgtgtggcctcttccttcccctgttggtggatttggcctgcacggattctgtgtggcctcttccttcccctgttggtggatttggcctgcacggattctgtgtggcctcttccttcccatgttggtggatttggcctgcatggattctgtgtggcctcttccttyccatgttggtgtccttttttccatgccaggaatcctggttctcaagggcggggttgttggcacgagcgtgatgcagactgcctttgctgcctttctcttgcccagggctgaacatggagctggaagacattgcaaagctgaagagtaagtgttgccctcccygcctccttgcagctgggtggggcctcctccttgcgaggaggtgggtgacacctcctcgacccacagtgatcctgctgcgcctggarggggccatcgatgctgttgagctgcctggagacgacagyggtgtcaccaagccagggaggtgagaggcggggagccagccccttcactgcaggcccagcctagagctagaaacgggccatggtgcagtcctgggctgtcacatcacgagtgaggcctgttttcaggcctgttttccctttttgagacctgggaggagcrcctgctttgcatgatctggttgctgagatgttgagaggagcagcacacactcccacgggacagcacacagccccccacggaacggcacacacacccatggaacagcacacacactcccacgaacagcacacacactcccacgaacagcacacacactcccacggaacagcacacacacccacggaacggcacacacacccacggaacagcacacacactcccacggaacagcacacacacccacggaacggcacacactcccacggaacagcacactctcccacggaacagcacactctcccacggaacagcacacacactcccacggaacagcacacacacccacggaacggcacacactcccacggaacagcagactctcccacggaacagcacacacactcccacagacagcacacacacacccacggaacagcacactctcccacgcggggccgctgggtttcctgcagtttctcctcctccaggcctttccctggaccctggtccagtccgtcatttgagcacaggtgcctgttagaacgagaccttcttgttaggacgatgagtgtcccagccaccacctcttttggactccgggaggcctggaacgttctgaacgctccgtggggctccagtcttctccgcagccagggcagcagggtttgctgtctgtcytgcaggcagatgaggagtcagggctggggcctgtgtgggggctctcctgagcgcrcagccgccgaggtggagcgtgttctgcctgagcgccgacctggtcgggggaatcccagttgcttccaggtggagccactgtcctcagcgtaatgctcaaggctctggcctggctcctcggccaccctgcaccctcagggtcccctcctgtagcttctgctgccccatcactgtcactctccaaagctttggggactctgcccagagccaccgcctcccagaagcccctgacaacctcttgacgaccccctagtgaccccatccctcccctctgacggcggcccctgctctgaggcggcttcttttcctcggtgctgttctcgtgctggccaggcctcctctccccacctggaggctcctgagggcggaggcctctcacctccaatgctggygtcccctggagggctgaatttgtttccgagggaaggaaacttccacagttgttgccttcagttccaaagctgcagcctgatttccccctccaggctcgagcctgttttcttctcggcagctacatctttgaccantgtcgtcccccctcaggcccgagcctgccnycttctcctcagttcccaaagctgcagtctggtccccccgccaggctcgagcctgccttcttctcctcggcagctacatctttgagctgtttgctgaagcccagatcacgtttcagaccaagggctgcatcctggactcgctggaccagatcatccagcacctggcaggacgtgagtgctggcacggggtctttggtgcgggcaaatgtggcgtagggggtgcagcaggcctccatcttggcagtcagrgctcccctggccgtcacctggccgtcagcaggaacaggcccacagaacctcatcttctgatcggggcgtggaggcgttagtgccacttgccagctgccgtagagcctgtcccagttctgcagctggcggcttcgtcctacagcctcatcccattattctgcttttgagaaagagcagcccaaggccctagctggcttgtggggcctctggcttctccacaccaccccgagttctgcttctcagagttgtggggtccagaggctttgcccagaggcggtgtccccatgggctgctctggtttgagacgccgggcccagcggggtctctcctctgctgcgctcccgggtgctggggagggtggcttttgctgcttcaacccttaggcgaccatagagcctcttttcaagtcccactgacccccttggagactctgtccctgcctggcttctctcctggctgctgggaagagcaggcgaactgcccgccctgaatggatgctgcgctccaccctgggccccccattgggcaggagatggagcttggcagtcgggctgagcgggctcatgctggaagggccggggctggggtcggggcctcccctgcctgcagtgtgggtgtcagcgccctgctgccctccaggtgctggagtgttcaccaacacggccggactgcagaagctggcggacattatccaggtggggcctgctcctctgtggcatctccttccctgatggaagccgggcgggtgccttctcctgctgtattagttaactgattctagacttggggatgggagaaaggcccctacaccacctgtttctgattggcaaactctcggctcctttccagtgccctaaacccacactgggcctcctgcagggatgggggaggacgaggtctggtggcacatgcccagggtgaygctggtgagggaggacgcaaaggacagtgggggccggggagccgctcctgccctgtccgggccctcaggccaggggggacccactgctggcagccccagcagccccagctgcacgcagatgaagagctctggacacacgcggcttcctgaacagcttctccagggacagacaaatggggaccctgcaggttcccggcrggggtgtccctgggagcccatgattgggggtgcgaccctggcccccttctcattggccccgtcctgtcctgcaatgcccgtcccatgtgaggtctgcttctggctccatgcctatggcagcacctgctttccctggcgtagaggtgcttgtccggtttgtggagggcacgccccattttgggtgctctgggcacgttgcctctccggggcctcggtggcttttttagaagcagactcagaagtccctgactggggaarccaaggcacaggtggctgtgtggagccctgtgaggcctcctctgtgctgcccacgctgtacctgctggccacacgagatcatggcagggttaggcagggctgcccagcgctatgacagcttcatgagtgtccatctggcctgtggggtgcttgagctgggggaggccgcagaagaaccctgggatgcatggctggcctgtgcatgctgctgggcatggagctgcagatcccggaacaagcaggcactgccttctccttcacagacgcagctctgagcgggggcgagacctgggcagggaccaggtggggtgggcacagggtggtggggcccaggctyagccctccctccactgtggccgtctctgtggccagtgacgccacagcctgtgtcttctctgtgcggtagctggggctggaaggacagcactgccttgtcctcccaactcctccccaaaggcacggtgggcatcccaggcccagacccctctgtctgtggctcctgcctgccaagggctgctgtgctgtcccgcatggagtgtggttggctcttcaagcaggaggccgtgcacctatcaggcggacctgcttccatgtccctgatgggtcactgcaaagcacctccagcacatggccaggcgaggtagccctgcagcccagggcctggagggcaggtgtgagctggcccgggcctgtccctccctggaatacagcttcccaggctcccacttatggagaagtctcctccacactatggaactgaatcctagaatgtggcttctgaggttcctacactcgaactgaatcctggaatgcggcttccaaggcttccagctatggagaagactccacactctggaaccgaatcctggaacgcggcctcccaggcccccagctatggagaagactccacactctggaaccgaatcctggaacgcggcctcccaggcccccagctatggagaagactccacactctggaaccgaatcctggaacgcggcctcccaggcccccagctatggagaagactccacactctggaaccggatcctggaacgcggcctcccagcctcccacttaaggagaagtctccacactctggaaccggatcctggaacgtggcctcccaggcccccacttaaggagaagactccacactctggaaccgaatcctgcacactccatcggtttggaatttcctttggctgctgctctaagtagccgctggtggatgactcagcttctgccagccctcgggtgcctggaggatgagggactgcacacagtgctcacccgcgttggctcctgagcccctgcaggtgtgggcggtgcccatagggctggtgctgggttgggcctgcagccctgagtcacaggtgaccctgggggcagagtggggccagtggccccaggaagaggatgtgggatgcacagctcagctggaggcgaactccaggcagggtcaggccgtgtgctcggaagtcagggcttagctggaggcaaactctgggcagtgctggcccgtgttggggaaccagttgcccctgggcccccgtgagactgctgggtcctcatccctctctgcctgaggccggagctgccctgggctgaggcacagggggatttgtggtggtgtttttttgagaaagggtctcgctttgtcaccccggctggagtgcaggggcttgatcacagctcactgcagcctcaacctcctgggcccaagtgatcctcttgcctcagccacccgaggagctgtgaacacaggtgtgcaccaccgcactcagctaatttttaaaatttttttgtagagatgaggtcttgccatgtttcccaggctggtctcaaactcctgggctcaggcagtctgcccgccttggcctcccaaagtgctgggattacaggcaagagcttccatgcctgcccagcagaaggcttttcgaaggaagctgtttcctgaggcagactcagccctgctcatggcagccaccagcgtgggggtgaacttgttctgttacttccatccccgtgggccaaatgctttggtaaaacacaaggccctgtgtttagctgtcttgacagtgaaaatggctgggaaggaaggaaggaacggaaggaaatttctctctccttctgtgcgtacccaggcacgtgcacatgcatgcagagtacgcacacacgcacgcacgcctgcacaaatccacgcatgttgccaagtctctgtgttccagccgtggtgtctgccccccggtgttctctagttcggcttctccgcatttctgtgaatgattccggcttcttggtgttcccagcagaactccctcaagtctgcggcggggctctgacggcggtggcttggctgacatggccacattgctgagcctgttgggggctttgcgttcctgttctggccgtttttggctcgttttccaggaacggtcgtcacgcgctcctctcctagtgcaggcatcattcctttcccattgatttgcagggttctctgtaagttctgaggatcccatatacatatwctctctstaagttctgaggatcccatatacatattctctctctaagttctgaggatcccatatacatattctctctctaagttctgaggatcccatgccgacatacatattctttccttgtctcatgctggtcattttttccattttcatgacaggtttggtgaacacatgtttccttgttgtcagatttttgttctgagcttgtgcctcccgaccaagatgctaaaccgggtcttgtgtattctccaaactgcactgtagagtgacggagctttgtgtctgggcctccatgccttctgacgtcacctgtgggggtgtgaaaggcagactctaccttgatttttcccagcacgccacaccggtggttctgtgykctgaccgagcggctcggcttcccccaactccactgggcacctgccacacttttcctcatgtttttgttcactgtggttttgtcgtaagtcctggtgttggcctgaaccaatttctttttgtttgtttttgagacagagttttgctcttgttgcccaggctggagtgcagtggcgcgatctcggctcactgcaagctccgcctcccgggttcacgccattctcctgcctcagcctcccaaatacctgggattataggcacctgccaccacgcctggctaattttttgtatttttagtagagacgaggtttcaccgtgttagccaggatggtctcgatctcctgacctcgtgatccgcctcccaaagtgctgggattacaggcatgagccaccgtgcccagcctgatatttttagtagaaatggggttttgccatgttggccaggctggtctcgaactcctgacctcaggtgatcctctcaccttggcctcccagagtgctgggattacgggtgtgagccaccacgcccggcctcttgttcttttgaaacctgccctgacgttttttccatagtgcatcttggagtcagcgtgtctacttcctgtaaaaatcttactgtgattttgactagaatgtgttgaattcctgttttttttttgagtcagggtctctctgttgcccaggctggagtgcagtgggaccatcacagctcactgcagcctcaacctcctgggctcaggggatcctctcagctcaacctcccaagtagctgggaccacaggcacatgccaccatgcccggctaggtttttttttttttttttttggtgaacaccctggggttgcaccatgttgyccaggctggtctcgaactcctgggttcgggcagtttgctcctctcagcctcccggagtgctgggattacaggcctgagccactgcactaggccatgttgaatttctagattaatttggggccctcaggggcacagagaggagggctgggccagttggcgggaggagaggcccctcgggctgcygcaktttcagtgcatggagatggcctatgttgggggaacacagagctcaccgggggtccctgcagggaggagaaagggtcaggcaggtgccagctcctgtccattggcctggggctgcatgatggcaggggccggtgaaccgatgacccctgggtgtcctgtgaccttctgtgtatgcggctgatgctgcagaaagtcgggtgkcctcaggctcctgacggggctgcacttcctctgcctttcagattgtgttcagtgtggacccctccgagggcagccctggttccccagcagggctgggggccttacagtcctataaggtaggkgccacctccaggaggcaggtggagggcagcccttgttccccggcagggctgggggccttacagtcctataaggtgggggccacctccaggaggcaggtggggctgggggtcttctggtcctaaaaggtaaggggctgcccccaggacatgggyggggcctccacactcctggtcctgtcccctccaggtgcacatccatcctgatgctggtcaccggaggacggctcagcggtctgatgcctggagcaccactgcagccagaaagcgaggtacagacctgggcccacacgctccccgcccgccygggtgcagtgcccggcaccaccatgccacaggctaggcacatgcccagccgtggatctcctgcccccatgggcctggccaccttctccatatccaggccaatccagagcattctcctcactgtccctctgaagattggagttactgagagacgtaggagatggcctgatggcaccgtgacctgcccagagtcacctggttggtggtggcagagccacagcccagccaggcctccctgctgggacacgctcgtttatgccgaggccgtcagcacagagcctccacagtgaggcacggctctgcctgctgcctccacgcagcgcctggccgggccaagcctcagggtcacatctgaagggggcccggctggccctgttgtccgaagcccctggtgcgctcagccccgaggccccacgtgccttcttggcttcctgtgctccgtggcgtcttcgagtcggtgctgccggggacgctgtgtggatggggtctgtgagtgtgccctcggctccgtgtccggagccctgtggttcttggggtgtatctggccccacccccactgcgtggtgtccagggtggggcttcacggctgcagctgcgggagctgctgcccctgccttgtgctccagtggggccttgcctctgggcttggttcgtccctctctggaacattctttctcagctgctgtccgacccatggtggcatgacgtggccctggctgaagcagcccttgtgcggttgctgtggttgggtctgcctggccgagccggaagggaagggctgggagggcgtcagggtggcgtggcttgacccccgctcggtgatggtcctgcagcaaggcctctcccagcaggaagcgtccatcccggggggaggccggcgcccctcacgcagttggggttgcgggaggcagtgcgtgcctgaggcagccggtgcacagattccaagggcctggaatctgtytgttccattgacctctgatgtcacttgacttctcagaagcagccactccctgcactgggcgtttgtaggaaatgagctcctggaggagggggtggggaagttcccccattgcagggcacactcagccccaggaaggaaacgtgcctcgtccctgctgactccgaatcgcagtcagagtcgttctgcttgtgccgtgttgaattcccggcatccggcatccagactcagcctcctccccaggccacggccgccgtggccagtcggtcaagcccttctaggaacttcctttgagctggcgcccttgttcactgctgacgccactcagaggcttgtgcacgtgtcctgcttccaggcagagctgggaactcgcaccccgtcttctgcacgcggccgtggaatgtcgggatgccggcgcttccttcccgtgtgctcttggcggggtgggcttcttgccctgagccgcatgtcacagtttctgcagaagtttagggttggagtgggctgacctctctgcaggtgtccccagcctctgcctggggtctgcctcctactcccaggaccccctgtcccccagaggggccccaagctggcaggctcacactcagggcagcctcctttgttctgacttctgcacastgggcctgggtggctgcccgcggctcgcttgcttgatgccagtgggtggagagggtgatgggcagagaggcaggtggtcaggcccccagtcccgtcctcacactctgtgccctctgccgccccccgccccacagggaaggtgctgagctactggtgcttcagtcccggccacagcatgcacgagctggtccgccagggcgtccgctccctcatccttaccagcggcacgctggccccggtgtcctcctttgctctggagatgcagatgtacgggccacccctgccagggcctgagcaccggtgacacctctgacatcagcggggtggaagtggtgggggtccccatgagccgggtgctgggggtctcgggcctcgagggctaaaggggtgctggtgcacttccccactgtctgctccctctggccacgctcagccctttcccagtctgcctggagaacccacacatcatcgacaagcaccagatctgggtgggggtcgtccccagaggccccgatggagcccagttgagctccgcgtttgacagacggtgagggcctgtccctgggccctgctggggtgggaggtgggggagcactgaggcctgaggncctgagcagtggcctctccggctctaggttttccgaggagtgcttatcctccctggggaaggctctgggtgagtgccctgaatgccccagctgtgcscatcctggatcctggacccctgctcccaagagctggtaggganccctgcagacatcctgcccctgccttgaccccggcccctgcacttccaggcaacatcgcccgcgtggtgccctatgggctcctgatcttcttcccttcctatcctgtcatggagaagagcctggagttctggcgggtgcgtctcccctgtgttctgggcggggtgggtgagggcagggctggagcatgaagcaggcagtggtcacagctcctgcttgccctcatcggatcggcggcgtgaccagggctgccgtgtccctgcctcttcctcccacaggcccgcgacttggccaggaagatggaggcgctgaagccgctgtttgtggagcccaggagcaaaggcagcttctccgaggtcggcacttggccggggctctgggcctgctgccccctcgtgcctcccctgcctctcacagcttccccaaggctgaccactggccctgaccatgggctccggcggctcccgctgcctcttcagggctcctgcgtttccttcctggccctgagtgttgcctcttatcttacaaagcccccagcaccgggtgggtgtggtaacagtggccctcctgtctgagtagccctagtcggccaccctggccctggggttccccgtgttttctgggaagcactgagcaggcgtggggtcagcctgggatccgtgccaggaagaagcttccagaacccgattggccttcctggctaggacgatccttcatcttggagcatgagacctgggtctccctcatgggggaggaaggggctgggggggggctccaggctcagcctcaccaactttccttccagaccatcagtgcttactatgcaagggttgccgcccctgggtccaccggcgccaccttcctggcggtctgccggggcaaggtgagctctccagggccctctgccctgacctggttgcctgttccctggtgggtgcttatggctccccagcagactctgggccctgggggctgcccggtcccctccttgggtcccacgagagcgactgctggccctgctgggagcstgtcctgctctgggcctgggcaggcaggatgggagtttcctggccacaagagttggaggtggcgtctgggagctgtggaccccaagtggggtcctgacccacagatggagcttcctcccmcccctggttggggacggagcctcggggaaggtggctgggctgggtgtgggcaccagggagaggagcccccacggccccaggcagctccctggtgtgtcccctaggccagcgaggggctggacttctcagacacgaatggccgtggtgtgattgtcacgggcctcccgtaccccccacgcatggacccccgggttgtcctcaagatgcagttcctggatgagatgaagggccagggtggggctgggggccaggtgagttacagcagggtggggctggggtaaggcggtctggtgactgagcccccgccccgtggccaagggagcccccgtgaccgagccgcctcgccccacagttcctctctgggcaggagtggtaccngcagcaggcgtccagggctgtgaaccaggccatcgggcgagtgatccggcaccgccaggaytacggagctgtcttcctctgtgaccacaggtgcgtgcagtccggtggcaggcgcggcgccaggggacacgcccacaccccactgggcccctggactctccttccccacatgaggccccgtctcctccagagcctctccggctactcggggtcagcrtggggcccctgcagcagatgagggtcttcacttcggtgaactgaacccttgaagcggctgtgggcagggcagcagggctatggccaccccccaggttcgcctttgccgacgcaagagcccaactgccctcctgggtgcgtccccacgtcagggtgtatgacaactttggccatgtcatccgagacgtggcccagttcttccgtgttgccgagcgaactgtgagttcctgcccagggaggggatgagggtgttgtccccagaggagccagaaatgggtccacccacccccatggttctgcagatgccagcrccggccccccgggctacagcacccagtgtgcgtggagaagatgctgtcagcgaggccaagtcgcctggccccttcttctccaccaggaaagctaagagtctggacctgcatgtccccagcctgaagcagaggtcctcaggtgcggacgggcagcgctgggtgggcggtgtgggggtggcggagcgggcggcgtggggcgggcagcaccaggcgcccagggcggaggcgactcacctggctttgtgcgcttcccctcccacctccaaaggctgcctctccctcctagggcagggcccccacgggctgcaaccctcccctacaggcagagaacgccccaggcaaggatgccccccgaggctgagactccccccaatagcagggaggacacccacaggcaggaccccaagtgctgggactctcccccaagaggggctttgccacaggcagggaccccagctggggccccccgtgggcttcactgcgcactcgggtgcccytgcagggtcaccagctgccggggaccccgagagtagcctgtgtgtggagtatgagcaggagccagttcctgcccggcagaggcccagggggctgctggccgccctggagcacagcgaacagcgggcggggagcccyggcgaggagcaggtacagttccagggccttgggatggacacagaccctctgtctyctgaggccaacccgaycccgcccatctggcctcaggcacctccccacacacccctgtaaatcccctgcctggcaggcaggcgggcaagcgggcgggggatcccagctgcctggctgtctgtgggtcctccaccccacctcacccacaggctgctggctcccaggtggtgcatgccctggccctccgcgggtgccccccacatcactttggttctctggcgggtcagcttggctcagtgcactcaaggtcgggtgcccctgccactggctgcgcttgaggctggcctttctccaggaatgtgctgcgggtggaacccaggttccttcttccttggggccttttgccccagaagcccrtaattcctcaggccaacccgaaattttctccctgcttcctgctgggagccattcccctcttcctgcccatccctgcccttcaggcccctggagtgagctccaggtgcaggcaccaggcacctgtgtccccttcctgccagcccctcgctgtggtcggactgtcttccctggacctgctcttacaagtcaccacctgcgagcctcatgagccgctggtgtgacttggacaggacmaagttgtggcactgtcaccggggtgtgctgtgcccccctcccccgacctccatcttggctcagggctccttgsgaccatcttccctgtgcgtccaggtgctttgggaccccagagtgtgtggttggggtctgtgtgtggttgtgagctgtgtcctcctcaggcccacagctgctccaccctgtccctcctgtctgagaagaggccggcagaagaaccgcgaggagggaggaagaagatccggctggtcagccacccggtgcgtgagctgtccctgcacctgtgccgaccaccatagacacgcatgggaacgcagccgtgggtgcccccagccacggctggtcccgatgggaccagggaatccacccccaggagctgatgtccagggcagctgtgatgctgacggccaggggctcaagtgtgtggtttcttctgcagggggctcatgagtcccagctggaatcaggccccacccttgggcaggtttggcatggggcctgcagcactgggcttggccctggcatttccctcaagtgtggatgcacacctgcctcatgtgagggacacagcccattcctagccttggatcaaagaacggagttatagccggagccaggaagccccctgcctgctggaaaaccccaagtgtggcggcctttgtccatgtcccttggcttctgggaagaactgggtggtgcccaggcagggctggtgccatcaggaagtgggtggctgctgaggggcctgggctggcgagggcctgggtggggagtgcctgggccgcccctgccttggtttccacgtttccgtgttggtctggggtgtgtagagagatgggcactgctcatccggaagcccctccttgtgcgctgccatcctgggagcctcagccgcatccgctgtggggcagggggcttgagggaggaggagagagacgggccatgcaggacccctggcttgaggcagagccaatctaccctttgcccattcactgctctcagttccctgccagcctctcactgtgtgacctcagacgggcccagccccacagctttcttcccgcagcccctccctatgtccatccagccagccagtttctcaggcagcagccccacctcggcagtcactgtcccagggaaygctcaatgttccaaggaaggctctgcagccccagggaccagatgatgaggctggccctgatggagcctcgggcctgtgtcctgcaggaggagccygtggctggtgcacagacggacagggccaagctcttcatggtggccgtgaagcaggagttgagccaagccaactttgccaccttcacccaggccctgcaggactacaagggttccgatgacttyrccgccctggccgcctgtctcggccccctctttgctgasgaccccaagaagcacaacctgctccaaggtgccctggcttgcagaggccmcccaccctgagggcagtgctgccgcygcgtgtggggtgggggccatctgggtccaaggtggtctctgttctctagagaaaaaggggcagatggggacagacrccccttcctctacaggcttctaccagtttgtgcggccccaccataagcagcagtttgaggaggtctgtatccagctgacaggacgaggctgtggctatcggcctgagcacagcattccccgaaggcagcgggcacagccggtcctggaccccactggtaaatggggccccaggtgggaccctcagactcctgcgtggaaggcagtgtgggccagagtcctgggctgcttggggtgggcatcctcgggccctgcttggccccgcctctctgttcccctatgggagtgatgggggcctccacctccaccaccagcaccagcagcaccaccaccacctccacnnnnnnnnnnnnnnnnnnnnnnnnnnnnnnnnnnnnnnnnnnnnnnnnnnnnnnnnnnnnnnnnnnnnnnnnnnnnnnnnnnnnnnnnnnnnnnnnnnnnnnnnnnnnnnnnnnnnnnnnnnnnnnnnnnnnnnnnnnnnnnnnnnnnnnnnnnnnnnnnnnnnnnnnnnnnnnnnnnnnnnnnnnnnnnnnnnnnnnnnnnnnnnnnnnnnnnnnnnnnnnnnnnnnnnnnnnnnnnnnnnnnnnnnnnnnnnnnnnnnnnnnnnnnnnnnnnnnnnnnnnnnnnnnnnnnnnnnnnnnnnnnnnnnnnnnnnnnnnnnnnnnnnnnnnnnnnnnnnnnnnnnnnnnnnnnnnnnnnnnnnnnnnnnnnnnnnnnnnnnnnnnnnnnnnnnnnnnnnnnnnnnnnnnnnnnnnnnnnnnnnnnnnnnnnnnnnnnnnnnnnnnnnnnnnnnnnnnnnnnnnnnnnnnnnnnnnnnnnnnnnnnnnnnnnnnnnnnnnnnnnnnnnnnnnnnnnnnnnnnnnnnnnnnnnnnnnnnnnnnnnnnnnnnnnnnnnnnnnnnnnnnnnnnnnnnnnnnnnnnnnnnnnnnnnnnnnnnnnnnnnnnnnnnnnnnnnnnnnnnnnnnnnnnnnnnnnnnnnnnnnnnnnnnnnnnnnnnnnnnnnnnnnnnnnnnnnnnnnnnnnnnnnnnnnnnnnnnnnnnnnnnnnnnnnnnnnnnnnnnnnnnnnnnnnnnnnnnnnnnnnnnnnnnnnnnnnnnnnnnnnnnnnnnnnnnnnnnnnnnnnnnnnnnnnnnnnnnnnnnnnnnnnnnnnnnnnnnnnnnnnnnnnnnnnnnnnnnnnnnnnnnnnnnnnnnnnnnnnnnnnnnnnnnnnnnnnnnnnnnnnnnnnnnnnnnnnnnnnnnnnnnnnnnnnnnnnnnnnnnnnnnnnnnnnnnnnnnnnnnnnnnnnnnnnnnnnnnnnnnnnnnnnnnnnnnnnnnnnnnnnnnnnnnnnnnnnnnnnnnnnnnnnnnnnnnnnnnnnnnnnnnnnnnnnnnnnnnnnnnnnnnnnnnnnnnnnnnnnnnnnnnnnnnnnnnnnnnnnnnnnnnnnnnnnnnnnnnnnnnnnnnnnnnnnnnnnnnnnnnnnnnnnnnnnnnnnnnnnnnnnnnnnnnnnnnnnnnnnnnnnnnnnnnnnnnnnnnnnnnnnnnnnnnnnnnnnnnnnnnnnnnnnnnnnnnnnnnnnnnnnnnnnnnnnnnnnnnnnnnnnnnnnnnnnnnnnnnnnnnnnnnnnnnnnnnnnnnnnnnnnnnnnnnnnnnnnnnnnnnnnnnnnnnnnnnnnnnnnnnnnnnnnnnnnnnnnnnnnnnnnnnnnnnnnnnnnnnnnnnnnnnnnnnnnnnnnnnnnnnnnnnnnnnnnnnnnnnnnnnnnnnnnnnnnnnnnnnnnnnnnnnnnnnnnnnnnnnnnnnnnnnnnnnnnnnnnnnnnnnnnnnnnnnnnnnnnnnnnnnnnnnnnnnnnnnnnnnnnnnnnnnnnnnnnnnnnnnnnnnnnnnnnnnnnnnnnnnnnnnnnnnnnnnnnnnnnnnnnnnnnnnnnnnnnnnnnnnnnnnnnnnnnnnnnnnnnnnnnnnnnnnnnnnnnnnnnnnnnnnnnnnnnnnnnnnnnnnnnnnnnnnnnnnnnnnnnnnnnnnnnnnnnnnnnnnnnnnnnnnnnnnnnnnnnnnnnnnnnnnnnnnnnnnnnnnnnnnnnnnnnnnnnnnnnnnnnnnnnnnnnnnnnnnnnnnnnnnnnnnnnnnnnnnnnnnnnnnnnnnnnnnnnnnnnnnnnnnnnnnnnnnnnnnnnnnnnnnnnnnnnnnnnnnnnnnnnnnnnnnnnnnnnnnnnnnnnnnnnnnnnnnnnnnnnnnnnnnnnnnnnnnnnnnnnnnnnnnnnnnnnnnnnnnnnnnnnnnnnnnnnnnnnnnnnnnnnnnnnnnnnnnnnnnnnnnnnnnnnnnnnnnnnnnnnnnnnnnnnnnnnnnnnnnnnnnnnnnnnnnnnnnnnnnnnnnnnnnnnnnnnnnnnnnnnnnnnnnnnnnnnnnnnnnnnnnnnnnnnnnnnnnnnnnnnnnnnnnnnnnnnnnnnnnnnnnnnnnnnnnnnnnnnnnnnnnnnnnnnnnnnnnnnnnnnnnnnnnnnnnnnnnnnnnnnnnnnnnnnnnnnnnnnnnnnnnnnnnnnnnnnnnnnnnnnnnnnnnnnnnnnnnnnnnnnnnnnnnnnnnnnnnnnnnnnnnnnnnnnnnnnnnnnnnnnnnnnnnnnnnnnnnnnnnnnnnnnnnnnnnnnnnnnnnnnnnnnnnnnnnnnnnnnnnnnnnnnnnnnnnnnnnnnnnnnnnnnnnnnnnnnnnnnnnnnnnnnnnnnnnnnnnnnnnnnnnnnnnnnnnnnnnnnnnnnnnnnnnnnnnnnnnnnnnnnnnnnnnnnnnnnnnnnnnnnnnnnnnnnnnnnnnnnnnnnnnnnnnnnnnnnnnnnnnnnnnnnnnnnnnnnnnnnnnnnnnnnnnnnnnnnnnnnnnnnnnnnnnnnnnnnnnnnnnnnnnnnnnnnnnnnnnnnnnnnnnnnnnnnnnnnnnnnnnnnnnnnnnnnnnnnnnnnnnnnnnnnnnnnnnnnnnnnnnnnnnnnnnnnnnnnnnnnnnnnnnnnnnnnnnnnnnnnnnnnnnnnnnnnnnnnnnnnnnnnnnnnnnnnnnnnnnnnnnnnnnnnnnnnnnnnnnnnnnnnnnnnnnnnnnnnnnnnnnnnnnnnnnnnnnnnnnnnnnnnnnnnnnnnnnnnnnnnnnnnnnnnnnnnnnnnnnnnnnnnnnnnnnnnnnnnnnnnnnnnnnnnnnnnnnnnnnnnnnnnnnnnnnnnnnnnnnnnnnnnnnnnnnnnnnnnnnnnnnnnnnnnnnnnnnnnnnnnnnnnnnnnnnnnnnnnnnnnnnnnnnnnnnnnnnnnnnnnnnnnnnnnnnnnnnnnnnnnnnnnnnnnnnnnnnnnnnnnnnnnnnnnnnnnnnnnnnnnnnnnnnnnnnnnnnnnnnnnnnnnnnnnnnnnnnnnnnnnnnnnnnnnnnnnnnnnnnnnnnnnnnnnnnnnnnnnnnnnnnnnnnnnnnnnnnnnnnnnnnnnnnnnnnnnnnnnnnnnnnnnnnnnnnnnnnnnnnnnnnnnnnnnnnnnnnnnnnnnnnnnnnnnnnnnnnnnnnnnnnnnnnnnnnnnnnnnnnnnnnnnnnnnnnnnnnnnnnnnnnnnnnnnnnnnnnnnnnnnnnnnnnnnnnnnnnnnnnnnnnnnnnnnnnnnnnnnnnnnnnnnnnnnnnnnnnnnnnnnnnnnnnnnnnnnnnnnnnnnnnnnnnnnnnnnnnnnnnnnnnnnnnnnnnnnnnnnnnnnnnnnnnnnnnnnnnnnnnnnnnnnnnnnnnnnnnnnnnnnnnnnnnnnnnnnnnnnnnnnnnnnnnnnnnnnnnnnnnnnnnnnnnnnnnnnnnnnnnnnnnnnnnnnnnnnnnnnnnnnnnnnnnnnnnnnnnnnnnnnnnnnnnnnnnnnnnnnnnnnnnnnnnnnnnnnnnnnnnnnnnnnnnnnnnnnnnnnnnnnnnnnnnnnnnnnnnnnnnnnnnnnnnnnnnnnnnnnnnnnnnnnnnnnnnnnnnnnnnnnnnnnnnnnnnnnnnnnnnnnnnnnnnnnnnnnnnnnnnnnnnnnnnnnnnnnnnnnnnnnnnnnnnnnnnnnnnnnnnnnnnnnnnnnnnnnnnnnnnnnnnnnnnnnnnnnnnnnnnnnnnnnnnnnnnnnnnnnnnnnnnnnnnnnnnnnnnnnnnnnnnnnnnnnnnnnnnnnnnnnnnnnnnnnnnnnnnnnnnnnnnnnnnnnnnnnnnnnnnnnnnnnnnnnnnnnnnnnnnnnnnnnnnnnnnnnnnnnnnnnnnnnnnnnnnnnnnnnnnnnnnnnnnnnnnnnnnnnnnnnnnnnnnnnnnnnnnnnnnnnnnnnnnnnnnnnnnnnnnnnnnnnnnnnnnnnnnnnnnnnnnnnnnnnnnnnncacctccacctccacctccaccaccaccacctccaccaccaccaccaccacctccacctccaccagcagcagcatcacttgttggggagaccctgtgcaactccatgcacagccctgtccctgccatagccccgacccctaagcacagccctgtccaactgccacacgtcccctgcctcccatgcatggtcctggggggtcaactgcacacgccagggtcctagggtcctagacccctgtcctccctgtttctgcctctgtttggggtggagtccaagtctccagaggcggaagcatctgtgttcgtgtgttaatgaacagcccctacagagttcccctagttcacccaggggggaacctagcctgttgggacgaccccagatcccttctgggcttggtactcactgggatatcctcatgcctgcacccagcctacggctctgagctcctgagtggggctttggcctgcccgccactgttccagcccccatccagcaggctggtgtctcctctgatgcccccagcacccaggcgtgtacctgcctgggttttcccgccctggtctgaggtgggtgaggcctggcctccctagccagccctgcccccccaccccagggaactttccagatgctcycgaccagctttgtggctctacatctcttcatcaggaagaacggcgccggatcccaagctgaccgtgtccacggctgcagcccagcagctgracccccaagagcacctgaaccagggcaggccccacctgtcgcccaggccacccccaacaggtagctgactcctgaaccgtgtgcagcctacgacttggtgggtccctcagtggcttcacgaggctaactcttgagtgtggccggggctgcccctgtggggagccatctcatggtggggactgctcccggttctgcaccccgcagttgtcctgagcagctctccaggagttcctggaggaagggcgggcagggcggtgggactctcagtcctccaccccagcgccactctgagccatgctactcccacaccaggagaccctggcagccamccacagtgggggtctggagtgcccagagcagggaagcagggccagcacgccgtgagcgcctacctggctgatgcccgcagggccctggggtccgcgggctgtagccaactcttggcagcgctgacagcctataagcaagacgacgacctcgacaaggtgctggctgtgttggccgccctgaccactgcaaagccagaggacttccccctgctgcacagcaagtggccctggcgtggggaacagccggtggggtggggggcaggggacaaaatgggggctgtgccgggtctgattgaagctccccgcagggttcagcatgtttgtgcgtccacaccacaagcagcgcttctcacagacgtgcacagacctgaccggccggccctacccrggcatggagccaccgggaccccaggaggagaggcttgccgtgcctcctgtgcttacccacagggctccccaaccaggtagkgcacctgcctggctgctcctggcagcgccccaaccgcacgcagccctgggagtgagcagcaaagccccaggcccccctcagastcaagtctctgtctccaggcccctcacggtccgagaagaccgggaagacccagagcaagatctcgtccttccttagacagaggccagcagggactgtgggggcgggcggtgaggatgcaggtcccagccagtcctcaggacctccccacgggcctgcagcatctgagtggggtgagcctcatgggagagacatcgctgggcagcaggccacgggagctccgggcgggcccctctcagcaggctgtgtgtgccagggctgtggggcagaggacgtggtgcccttccagtgccctgcctgtgacttccagcgctgccaagcctgctggcaacggcaccttcaggttggtgcctggccactacagttcctgctgggtgtagccccaggtgatgggctgagggggaaagggcaggcccttgtcctggtggcaacgcctggcagacgtgtgcagtgggccggttgtctcacaggcctctaggatgtgcccagcctgccacaccgcctccaggaagcagagcgtcatgcaggtcttctggccrgagccccagtgagtgcccacggaggcccccagcacacccaacgtggcttgatcacctgcctgtccagctctggtgggccaagaacccacccaacagaataggccagcccatgccagccggcttggcccgctgcaggcctcaggcaggcggggcccatggttggtccctgcggtgggaccggatctgggcctgcctctgagaagccctgagctaccttggggtctggggtgggtttctgggaaagtgcttccccagaacttccctggctcctggcctgtgagtggtgccacaggggcaccccagctgagcccctcaccgggaaggaggagacccccgtgggcacgtgtccacttttaatcaggggacagggctctctaataaarctgctggcagtgcccaggacggtgtcttcgtggcctgggcttggtggtgggagttgagggacagggagttggcagaggcccctcccagcctgccatgtgacactgtacttcctccacggtgggctcagccctgccctcatcctcacagccgcagccaagctgcagttggtaggggatccaccgacacaccaggctgcctgggctggtctctgggttgggagctgccccaggtgctgaggagggcagctccctggctggtgaggcccctcccagaaccacccttggactgagctctggggagggatggtaccaggtgggtgaggggggctgcctggggagggaggggttcctatggggcgtggcgaggctggcccagccctctccccgcccatatatgtagggcagcagcaggatgggcttctggacttgggcggcccctccgcaggcggaccgggggcaaaggaggtggcatgtcggtcaggcacagcagggtcctgtgtccgcgctgagccgcgctctccctgctccagcaaggaccatgagggcgctggaggggccaggcctgtcgctgctgtgcctggtgttggcgctgcctgccctgctgccggtgccggctgtacgcggagtggcagaaacacccacctacccctggcgggacgcagagacaggggagcggctggtgtgygcccagtgccccccaggcacctttgtgcagcggccgtgccgccgagacagccccacgacgtgtggcccgtgtccaccgcgccactacacgcagttctggaactacctrgagcgctgccgctactgcaacgtcctctgcggggagcgtgaggaggaggcacgggcttgccacgccacccacaaccgygcctgccgctgccgcaccggcttcttcgcgcacgctggtttctgcttggagcacgcatcgtgtccacctggtgccggcgtgattgccccgggtgagagctgggcgaggggaggggcccccaggagtggtggccggaggtgtggcaggggtcaggttgctggtcccagccttgcaccctgagctaggacaccagttcccctgaccctgttcttccctcctggctgcaggcacccccagccagaacacgcagtgccagccgtgccccccaggcaccttctcagccagcagytccagctcagagcagtgccagccccaccgcaactgcacggccctgggcctggccctcaatgtgccaggctcttcctcccatgacacsctgtgcaccagctgcactggcttccccctcagcaccagggtaccaggtgagccagaggcctgagggggcagcacactgcaggccaggcccacttgtgccctcactcctgcccctgcacgtgcatctagcctgaggcatgccagctggctctgggaaggggccacagtggatttgaggggtcaggggtccctccactagatccccaccaagtctgccctctcaggggtggctgagaatttggatctgagccagggcacagcctcccctggrgagctctgggaaagtgggcagcaatctcctaactgcccgaggggaaggtggctggctcctctgacacggrgaaaccgaggcctgatggtaactctcctaactgcctgagaggaaggtggctgcctcctctgacatggggaaaccgaggcccaatgttaaccactgttgagaagtcacagggggaagtgacccccttaacatcaagtcaggtccggtccatctgcaggtcccaactcgccccttccgatggcccaggagccccaagcccttgcctgggcccccttgcctcttgcagccaaggtccgagtggccrctcctgccccctaggcctttgctccagctctctgaccgaaggctcctgccccttctccagtccccatcgttgcactgccctctccagcacggctcactgcacagggatttctctctcctgcaaaccccccgagtggggcccagaaagcagggtacctggcagcccccgccagtgtgtgtgggtgaaatgatcggaccgctgcctccccaccccactgcaggagctgaggagtgtgagcgtgccgtcatcgactttgtggctttccaggacatctccatcaagaggctgcagcggctgctgcaggccctcgaggccccggagggctggggtccgacaccaagggcgggccgcgcggccttgcagctgaagctgcgtcggcggctcacggagctcctgggggcgcaggacggggcgctgctggtgcggctgctgcaggcgctgcgcgtggccaggatgcccgggctggagcggagcgtccgtgagcgcttcctccctgtgcactgatcctggccccctcttatttattctacatccttggcaccccacttgcactgaaagaggcttttttttaaatagaagaaatgaggtttcttaaagcttatttttataaagctttttcataaaactggttgtagttgcacagctactgggagggcagccggggacacctgagccgcccgctgtgcccagatccctcaggctgcctgccatcagaactgctgcccggggcttcccctacctcagacagaccctccctgggaggatcagtggggagtgccacctctgcccccagtggctgtggcacgtggcaggggcccctgaagctcagcgagggtcagggcctgggagggtatcattgctggaagaacaggatggggctcaggccagccctagtcgccggggcccacactaaccccccacttatgaattcctcccactcccaactcacaggggatttcccgagaggggacctgccaaagacctcctccaggcctcccatgcttyccgggaagtgaagcttctcccyctctggggcaggctctgaagcctcccgatgcacccagagcaaccrgggggctgcaccagccactcgcctccccagcacggccaggttcccggggctggaggtcccccccaggtcctgggaaccaacctgcagaacacacacagggtcccctggagaggacgcggggacttccagggcccgactcctgtgagtcacagccccgcagctgctgcgccacccccaccctgactcatgccccttcccagcagctcctcccaggaccccatgtccttcccacatccgcaggaagggagtgcctggactctccaggcccacctggggagcccctcacctgcccaccagcccctgagcagcccagtaacaccatcaccgtgtccaacagccaggagcctccaccctccaggagggaagggatggacagagccacactcgccgtctttattttgcactcaccctgggtgacactgggcaggccgctcctgcccacagccagactgaggaagaacacagcactcggcaggcccagtggggtccgtgcagggaggaccccaggaccagccttactcccgagcaggggacacagggccccacagagaacccctccgggaggttctctcctggctgggggagggctctggacccccacaaacactccccaacttgcggggctggggcataaaaacagccactcccagcaggccccctcagctttttgcatcagtcagctccctcccgggggattagggtgaggtgaagccaggcccaggcgtggggtataggtcttcccccgcaggcctcagccctgtcccgaggctgcatcacaatccagggcccccgctggcctttgggaacatggcctgggtcttcctcaaggcaagatcagccccagaccacttccggggtcacggggtcacgagggcagaagccagatggcagccatggctgacgggcctcctcctcgatggggcggagacagccacggggtctcccgagggtcccacagggctgtcctcatgcagcccaagccagcctgagcactggagccccaattcccaaccaggtctccctcagaccccccagaaagggcctcgaaaggccgccgctgcgccctgtggaaaggctgccgctgcagggcctgggccagccgggctgccagactcccctccaaagcctccggatgcctacgcttttccagacatagaggaaagtttgtcttcgagaaaacaaagtaaatagaagaaccccaaagcaaagcaaacccaccccccagatcagcagcatgggagccaacaggaggccactcctccagcaccaggggaccagccgtcccgacggcagcgcggctgcgcctacgtgatgtccctctgccgcggcggccggtgcacattccgcacgacacacttcaccatccactcgatgccctcgcgcacccctttgctgtgaagacagcgggtgtgaggcggggggtctcggtccccaaagcccccgcaggtgcagcccccactcaccctgtgagggccgagcaggcctgggtcaggcaatckcgcctgccgatcttgctggtgcagtcgctgaaggcygtcttgatgtcagggattgagaggcacgtctgggggaggtaaggccgtgaggagcagcccccacgtctggccctgtcctgcctgtgggcccgggactctcagaagggcgtatgcccttcaccccagggaaacagccagagctccaccagggtcccagtgtctcccacagagaccacagcagtgaggaccctgtgctcagcccgaggctgaacatggctggtagtgcctgagacaaactagacgtccacacggctccaaggagtccaccccccatcccctccctgggggacaccctgagccccgaggtggggcgctgaggactgaggcctcctgggcagtggcggaggcaggtcccaggggcccacacagccggggatgatggagaggtgggagccctgcatcagtgatgggggcagtctgcagtcatggtggcttctgctcacaaccacctgcccagtcttcaaaaagcagccctcccctccccttttcctccgaggggagacccctgccccgtaccagatgtccctcttgtcggctgagattgtaggggaggccagccttacaggctgggggcaacagagccaccccagagaaggcaggaagtgaagattcacccggccctctggacgccgggctgcttctgtgcaaagccactccaagagaacagctagaactcagcgtggccagtgctcccgggggcagtggcacctcagaggggtcttgaggggctgccctgggggtggggctggcacagatgccacctccaagggtagcaggaacaggtaagggtcagagctgactcccaccagggccccagcatcacttctttgagctctgagtttcacctgggtgtccccacagcttggccacacactcctgagacacggccgccctcctggggagaggtgccctgcatagcaggaagaggcctctgggcgcctgccctgaggtgggagaacctccagggctggcagcagcaggtctggagaggaaccaagcttgggaagctgctgggggcagggcaggccttgagaatggctctgtaccccctgggcagtcactgggcctggggtgtctgggtgcacacctactccccttgctgtgggggaggctggggactcgggaagctgctgcgggaggcaggggtggggctcacctccacatcctgctygttggccagcaccaagacggggacaccgcacagcgcctcgctggtcaccaccttctctggggagggcaggagaggcagcgcctcacacccagcatcctgcctctgactgcccaggggcccacaggcgtggacactgtgacagccactccctctgccccccccccccccgtcacccactaggcaggagcacttctgaccagacactgagcctgccccaggcacagagctgcccaagctggacctgcccccactcaccatccatccctcccagagcagccaggccgcactcaccaaacgcctgcttggactcagccagcctctcctygtcggtggagtcaatgacgtagatgacgccgtgacactccgcataatactgggaggaagcaccaggagttggggctcagtccccaccctgccaagggccagcagagccaggcctgtgtcatggccacagtgaggggctcacatgaggaaggggcaagagggcagcccccaactgcaagacccttctgggatgcattctggggttgcggggagatctggtggaggtgtccccagacgctgctcctgagaacctgccggcaacctttggcctgatggtggccaaaggtgaaagacagggattgggccaggcgtggtggctcacacttattatcccaacactttgggaggcagaagcaggaggatcacctgagcccacttcacggccaacctgggcaacacagtgagactccgtctgtacaaaagcttatggtaatgtgcgcctgcagtcctagctactcgggaggctgaggtgggaggatggcttgagcctgggaggttgaggctgtagtgagctctgatcacaccactgcactccagcctgggtgagaatgagagaccctgtctcaaaaaaaagatagggtttgggggctggaggaacctagaccacagcctggcccgttgagggagtgcacctgtggggctctgtgccagcacctcgcacagggagggagtgtggccatgcggataagactgaccagcaccatctacgaagcgagccttccctgccaggacagggccagagtcactgagctcagacctctgcagcctgggctggtcagtcctgggctcgctggcaacactcctgggcaagacagggcacagcccctgcagcctcaggtacaagtgctgagccctggaccagatgagtgcacctctatctcaatcagaaaaaaacacagcaaactccgcgtccacgtggagcagacaacagctcacatttgccactttgcctccaggctgtgccagctctcctgtccaggcatgagtgcccagagacctagaactggatgctgaccaggtaggacaagctggtggtcagtgtgttaagacacacacacccgagagcatgagaagccaggaggcacagcccaactctccgaaatccttagggtgtctgagcagggagtaccagacaaccccatcccagtgccagacaagcttgtgcacctgcacttcccacagaggagagaagcctgtgcacctgcacttcccacagtggaaaggaggaggcccaaggccaggcccccccacccccaggaacttcccacagtggagaggaggcccaaggccaggcgccctccagggttctgcaggtagcgaggcccccccacccccaggaacttctctggcctacagacaggtcccacacagaggccgccaacccctcaagggaccctgcagtgtgccggctgtctgctgctgacacaagggagcaggcggaccctaaggtggagacctctgtggcaggaggggcggctctgtggaggctgcagcaagcccagtgagagaatctccacgtggctcctggggcttctgagcagggtggcagaaggttcatgtgcaaccgggtcctggaccatgggaccacgtggccagagccacccatcacacctaccaggcacaaggtgcacagcccagcagggccgcagtggacgggagcgacacctcagggctgagtgcgggcaggacccagagccccacgccccagtggaggcgtcacagcagtggtcattgtggggtgccccacaaggagggggaagagggaggtgtcccagcgtggctcctggctggccagctgaccccagtggagcagtcagagggactgtgggtctgagtttttctccccagcagcaatgggagctccccaactgcaaagtgccagccagcctgagagactagtgttacagcaaagaacccaggagctgaggtcctggcacatgccacacatgtggacaccaacccagggtccagccccaggacgaggccaattcgcaatgacgcccctttctgtggtgctggctctgcacaaggatgcaggatacaggaaccagggtgggagcaggggcctcccttccggtccctcccagtgacctaggggggtccctgcagctgatcctcccagctctgagctcagcagggtcaggggtcccggccactagagcagcacatactcagcagacacgctgaatgacgagccacagctgcctcatgggcatgacttgcacctcatgtctaggagaccctggtgggcaggagatggggctgccatcccacagctgtcccacagctggggacccagggagccactggccccaccacggtggtgtctggagaagggctcagactgccaggaagtcgcaccccagcagaagtggtagtgaattgggagggcactcaaggaagggctgtgcagccccaagaccagcagcaaggatgggctacagtggcccccttaagtctccctcttccagtttcgccttaagagaggccctcaggaccttggaggaacccctctccaacgtggaagtgtgggtccacatagggctgcagctgtggccagtgcaggcatctctggccccactgtattcttgcttcatgttggagaacactgcaccagcagatggtctcattttggtttctgtgggacccactttggctgcaaagagccacactgccaggtcacacctgcccagggcagcccacactggggacccaccaggccatggtgtgaagtcccggccagcctggccccacatggcacagcatagccagttctcctccagggctccctgctgggccaaccacagctctgyggatcctgctgcctgagtcgacctctcctctcccgtcctccctgccttcctggtgccgacccccagtgtgcatcctgtacctcgacctgtctcagcatctgtgcctgagacaccggcctgtgacaagatcatcatcatctgtgtcactccccaagcatgctgcgcactggacacacaggccctgactcaacttgtcctgtctgacttcagtggtcctacaggatctatcagagatcacttggccatgggagaaatgtcttcttggctagaagtcacagcaggaggggacactttgggggcgcctaggaaaggggaactaggat

SEQ ID NO: 95092 - DNA, 31701 bp, Homo sapiens
  misc_feature (1)...(31701): n = A,T,C or G
cttctggcctcaggctcaccctggtgctgtcgaattcacagctcaactacactcgaccagggctccccacgctgaacccccagctgctagaggcatggaagaatgaagtgaaggagaaaggccacgtcaactgtcccaacgacgtgagcggaggcagccgggtggggggcgtggggagccatacagggmcagagcctgggtgtggccctctgagcaggaacagaggctgagagctttcaggaggtgcccaagcccaccccaggcctcacatgcccagcctgcccagtccccaggactcacaccccctcacttgccccaaagagcctcagagatcccctggggtagggcaggggtatatcttggtgtggggtgcccaccagaggccttcgcccacggctcccttccctgcagtgctgtgaagccatctactccagcgtgtccggactcaaggctcatctcgccagctgcagtaaggtcagttctggggcctgccccacggccaggtgcgctgcactcagagctcccagctcaccccacgcgggcttcccacacagtagtgagggaccctgccttgtcccctactttttctacgtggcctcctcttccacgaacccagagactggccggtggctgatggccagcctaggacacctccctcgccccaaccccagccacaagacaacgagtcctagtcctgtccttggagctctgcgtccatgtaggcatgggtgggcaccccgacccacgcagatggcacactggcttacaataagggatgctcggcaaaggtctgcaactcttcccctgggcacctgcctctccctacccttcctctcccctaccacccctgccgccctggtaactcagtggccccctgcattgtctggcacagacagccacagctttccttgggccaccgctgactctgaccctttagccatgagtaggggcttaggacagatctgggtcctccaagggctggggcactggcctgcctatgcattgcagggggcccacctggcagggaagtaccgctgtctgctgtgtccgaaggagttcagttctgagagtggcgtcaaataccacatcctgaagacccacgcagaggtgcgagggccatcaccagggcctgtggctgggggctagcccaggaggggacagggctggggttgggcaccccttgggggtagagaggtcagtggcctgcatggggtgtgcctgggagagtggccaatgtggagaaatctggtagtttctcctcaaagtggggtctggcttccctgggagaactgggaggcttgcaccctgagctggagctgccctcggggtgtccgcctttccagcccccagcagccctgctgcaggtgcttgcctggtcccgaaggctgtgtccagccctgctgcaggtgcttgcctggtcccgaaggctgtgtccagccccctgcaggtgcttgcctggtcccgaaggctgtgtccagccccctgctgcaggtgcttgcctggtcctgaaggctgtgtccagccccctgctgcaggtgcttgcctggtcctgaaggctgtgtccagctccctgcaggtgcttgcctggtcctgaaggctgtgtccagccctgctgcaggtgcttgcctggtcctgaaggctgtgtccagccctgctgcaggtgcttgcctggtcccgaaggctgtgtccagccccctgcaggtgcttgcctggtcccgaaggctgtgtccagccccctgctgcaggtgcctgcctggtcccgaaggctgtgtccagccctgcggcaggtgcctgcctggtcctgaaggctgtgtccagccctgcggcaggtgcctgcctggtcctgaaggctgtgtccagccctgcggcaggtgcctgcctggtcctgaaggctgtgtccagccctgcggcaggtgcctgcctggtcctgaaggctgtgtccagccccctgctgcaggtgcttgcctggtccagaaggctgtgtccagccctgctgcaggtgcttgcctggtcccgaaggctgtgtccagccctgctgcaggtgcttgcctggtcccgaaggctgtgtccagccccctgcaggtgcttgcctggtcccgaaggctgtgttcagccccctgctgcaggtgcctgcctggtcctaaaggctgtgtccagccctgctgcaggtgcttgcctggtcctgaaggctgacaggtcttcagctctcaggctatgcctggctcaggtgctcagcatccagtcccaggtcttcatcagcgcttttctctccccagaactggttccgaacatcagcagacccacctccyaaacacaggagccaggactcattggtgcccaagaaggaaaagaagaaaaatctggcaggtggaaagaagcggggccgaaagcccaaggagcggaccccagaggagcctgtggccaagctgcccccgcgccgggacgactggcctccaggatgcagagacaagggggcccggggctccaccggccggaaggtgggagtcagcaaggcgcctgaaaagtgagcatggtgcgtggggcctggcccccatgcagccgccacaccgccctctgttcaaggcagggccagctccgggacctctgtcctccagttctccatcccccacccccgcctcttcatccgtccagtggggcagccagccactctcccttccctgaaggtggcccttcccctgttaaggctgccacagggcacacctgggttggggctccccaaggtgtgcccagcagaagtgcaatagccaggagggttgcccctcctcatgggaatgtgtctggggtcttggtgccacaggggctgcagcgcagagtaggcagatggcctttggccccccggctccgcttcctcaggccctgccgggtcccttccctggctaccccaaggctcaggcatccctggtgacctgtggttctgggctggtgagggcacctgagcaacctggcacgggcagccaccatcctggcctcacctccacccaacactggaactccagcacccccagctacctcccaggacagacccctgtctgaccactgccatgctgacctgacaggctccggcctgcccttggccacccacttggtccccttgcttctgttttctacctctccaggcctgcccactacccccacccctgctcctcctttgtcagtgcgatccctgctgtgctcaggccctgccccccaggcctgtctgtaattctcccagcttggggcaagggaggggttttgcttcttgtacctacagggcagcagaagcttgatgcccttcaacacagctgccagccctgggggtgtggggcccctggagtgtgctctcctccagtgttcagccttctggcactgcaggcctaggttggagcagcctcgtggagtagggacggactagttcgggccctggggtcttgctggggcccataggcatgtggggcaggaagctgggcagagctggcctggctctgagtggccactgggggaaaggcagccttctgtctgccaatctgggtaggcccagtggccaagctctcatgggagccccctccccacttttttttttaacctgcccccattgtttctggttgtgtggtcatttgatatgggaactgaaggccagccaggggaggggcttggccaaagtcacagcaggttgatggcagctccagagctgtctttgcccctttgtggccctgaggacggctgggtctataggtagggcaggggtcaggcagggagtccagggtgcctggaagaggtggccacagcctgtggctccctccctggggtcctgccttccaaccacggcattgcagggaggatgaggctcagagggggtaggtttggagggaggccattttccagggtgggtgggagtgggctgagggctcggccccactgaccctggacgatgagaattttgatgtttgcccgtgtgcgtgtgtctcctgggtgtagtggatgccagtcttgttgctgtgacaagtaacaaccttttttttaaattgttttttatacaaacactcgcaatccgacatttggtgctaagggtttcctggtgcagacggtgggcctgggggctgggctggaccagggcgtgggtctctggggttggggtcccttgctgctcagggaggcagtactgactgggcactgcctctgcccccagcacccaccctcccccattccccagggagaaggggccccactgggcttggcctgcagtagtagggagacaagttccaggagcactttggggactggggttgcagaacacttcctgtctctggcttcatccttgggccagaaggctccaaccctcagcagcccttgccagatgtgccagggagtgggtgtggagacccggactccccycacccacgcacacctcggcctgatgagaggatggaggctggggcagagatgggcgtgacccagcgtcagagggtcgggggaggcattccttcctgtgtcccagagcttcactggtggagctggaggagccggaggtggagggtggggtctggcagctgctgctggggcagcctcmtgaggggaggggaggggaggggaggggagcaggcactgggcgggggcctaggtgcactttgtccttgccaccaatggcgggaggagggtggacctgaacacctgcagggtgtggtgcctgccccagcctctcaggtacttggcccttggggagaagagaagagggtctggtttttgctgggggtgagtttccgggacactcccaaagcccacagataatccctggtgtgggaagaggagtcctggataccttgatgtttagcactttaaccccctttgtctttaaggtaggcgtgggggctactgccagaagtggctgttgggtctgaccccctcctttctgccctccctctgccacatgctggtccgcagagccctcctcccaaggggtggggccctgggtggagctcagcagggtctgcccactccctacgctggcccacataggcctccaggagccctcagtgagagggaccagcatagctgacccccagagtgtggtgggcgccggccctgcccgaggcccagtcggggccctttctgcagatctacctctggctcagcgcacgccccctgccctgagaacaggaaagggcccggaagggctgactcaccgggccgacgctcacacgaaaatgggatgcactttatttgctggtgcaaaggcaggtgagggtgcctcctgtgtgaccgttggccctcctgcctggtggcgctgaagggaaggagccagtgagcctgaccccgggaggggccgtccccgtgtgccgcgtttggcggggccccaggcggctcccccaggcccgggtctggggccccaggctttcccctgcctcgcggccgggcgtcccgtgctttgggtttcttggtttgggttttttaatgccagttctcagtacataagtgcattttgaaagaggttccagctatcacttgtaaccatatatatatacatatatattctatctacaaagtgtttatttgcgagatgtttcaacggtgagttcgggccccgcccgccttgtgaccatctgtccccggtcctcgtccccgccccgcgccctggtcccgagtggcgtggggacgggccatcactgtatgtattaaaatgactgtatcaaataaatgtttattgatttttttccagggtttttgtgcggctcagtttgtggtgaaaaacagggggcggggccctccaggcacgtggcggaggctgccgaactacgggtcccccatgcccgccgcgcggccttgtggggcttgtagtccgcgacgcgcggccttgtggggcttgtagtccgcgacgcgcggccttgtggggcttgtagtccgcgacgcgcggccttgtggggcttgtagtccgcgacgcgcggccttgtggggcttgtagtccgcggtgggcaagagagggacccgccagctcccggcggcccatgcgcgccgcccggccaggcccgcaaagaggcctccgagcgccatggctgcgcccccggcccgcgcggacgctgatccttcgcccacgtcgccacctacggcccgagacacaccaggccggcaggctgagaaaagcgagaccgcgtgcgaggaccggtaggcgtgggcctcgcctccactccactggcgagcgggaaggggctgcagatccggccgagctgggcgggtggtccgtccccgccgcgagcccaagtcccccactcccggaggccaggcggcggcgccccgttctcccacgtgccgggtggaaccccgcgggcttgaagcggccgggaggacggacctggcccaagccggcaggctcctcggggctcggggaaggagtccgggtgcgcacccccagcgttgaccttggtctctgcccccggtgggtggggccctcggcctcgagcgcccggcgggctgtgtgcctgctcgactgtgcgagttggtctatgttgtcggctcggggtgtggccctgcccgacccgcgaggccagggcttaggatttggaggtgctgcggcgcacggtgccttcggattgcctcgcacgcgcgtggcaccttcgagcctctgcgggggctttgcaagagcatgaagtggggaagttgtgggggtgcagcgggaggaacccgcccccaccccggttcgtcaccccgagtggcccctctgggagccgggccctgcgcggcgcctttggggccgtggccgtcagggggcggtggccacgcagtgcccggggctgcaagagggcgctctgggcgctgcccctcccttccgggtctgaagtgtcccttggggagcccgcggggtccccaggaaggggttgttcccactcaggcgcctcttgcctgggttcaggctgtgactcctgtcagaaacgctgtgagccaggactccctcagagatgggctgcgctggatgccgcagggggaagggtgtcccggcacagggtcgctcctctccaggagctgctgagcagaaagagctttcccctggccctgcgtcccttcaggtccacaccctcccagtgggcagtgactaggaactttgcatggctggagtctaatagggcctgagtctgttcctctgctggttccaaagaggcgttgtttttttgttttgagatggagtctcactctgtcgcccaggctggagtgcagtggctcgatctcggctcactgcaacctccctttcccgagctcagttcaagcaattctcctgcctcagcctcccgagtagctggaattacaggtgtgcgccaccacgcccggctaatttttttttgtatttttagtagagaggtattttgtcaggttgtccaggctggtctccaactcctgacctcaggtgatctgcccgcctcggcctccgtgggattacaggcgtgagccaccgcgcccagccaccaaagaggttttgatttaacccgaggtggggcaggccaacgctagataagcactgagrgctcttgagaaaggcactcctggatgacacaggttggtggcagcagccatctgggcctgccctgtgcacagacggtgggctgggcacggtggccctcgctgtgtcccacgaggcagagactgttgttatctttctttggtgtggttaccaagggacaggagggaagctccaggcagtgaggatagattgcagcacccttctccaggggccccggtctgccctggaactgcctcttgtcttaggcacatttcttgcactttgtgtcctgatgcttgtgccatcgaggacttcctctgccccagcctagggcttttctcactgttccccgagcgtgtccccaacgttcctgcgtctgcccctcttcaacctctgctgctgcccttagtgttccagagcaggctccagcttggaggtctgtgcacgggtggaggtctgtccccagggctggggttcctccaccaccgttccagtgcctcctgccacatcctcccggcaatcagtctgtccatcttgcctgttgtttattgtctgcttgccactcgtgactctgtcctgggcacctgcccccagagctggcccgtgctggtgcaggaacaggtcctttgtggtgttagcagtgactcctggctgcggttgagatggagtctggggctgtggaagtggggagcagagggaggctgcccatgatctgtgcagggcaggtcctgcwgagggaaggtttcctgagtggtggggtgggccagggcaagcccccaacccccagtgctcatccagcctgagaaagcagccctaatgactctccctgagtcagtccggcaccagtggggtcaggcctgcattggctcctgtgggctagctcctccctgctccctcctccccccagcctcattttagttatccagcaaacttcccttaaacctgacctgtcaggaggtgccgtgctacaggcacccagcaggaaggtccgtgggcgatggtgaccccaggggtggtagaacaggcctgaaccacagcaagggagtgcccgagccttcctttctccctgtgtgctctctcccgtggctgtttcctcagtgtcggtttcacatgccctgcgctccctgctgctggacgtttgcytctggtttccttggcattgtggatggttcgtgaggggcagccctgcctccaggtctccacacatgcctgtgcttatttttcttcctttcttttttttttggagatagagtcctgggctggagtgcaatggcaccatctcggctcactgcaacctccgcctcccgggttcaagcagttctcctgcctcagcctcccgagtagctgggactacaggcgcccgccaccacgcccagctaattttttgtatttttagtagagacggggtttcaccatgttggccaggctggtcttgaactcctgacctcagatgatctgcccgctcagcctcygaaagtgctgggattacaggcgtgagccactgcacccggctgcctgtgtgtatttcttttgttttgttttgttttgtttttgagatggagttttgctcttgttgcccaggctggattgcagtggcgcaatctcagctcacagcaacctctgcctcccgggttcaagcaattctcctgcctcagcctcccaagtagctgggattacaggcatgtgccactacgcccggctaattttgtgtttttagtagagacagggtttctccatgttggtcaggctggtctcaaackcccaacctcaggtgatccacctgccttggcctcccaaagtgctgggattacaggcatgtgccaccgtgcccagctaattttgtatttctagtagagataaggtttctccacgttgaggctggtctcaaactccgaccttgggtgatccgcccgcctcggcctcccacagtgctgggatgacaggcgtgagccaccgcgcccggccacctgtgcctatttcttgacgatgacatcagttatggggcctgatcaccgatgaggcatctgccttggactttatgagctgacccacctgtaatgaacctgctgttagtccttgaggaggaaactgaggcaagctgtggctccgtggaggggactgagccacattcgactgtgctgtggcccagagtaggatggctgaaggtgagggaagggcaaggggtgccctgaagtgactgaggcagcctccagcaccacgggcctcagacagccccacctgcaaggaggaagccttaggcagaaggtgctctgggcagcgcttaccccagcgcggcatcagcacctgtgggtggcgtgggaatgggagttctctggaccggcccagctcaggaagttagaacctgggaggaacaccagtgaataggaccagggcaggctacccctccccaccgtgagcggcccctccctgccgtgggctgctgtggccgagagcagccccgtggaggggcatgttggggaccacgtggcctgcagcgaggcracgtgattccagggtggggcctggtggttccattcacagctgcgtgcctgggctcctccgtccctcgcctggccagcacagtgctggcttccccaggcctgtagccttgcctcttggccggctagggcagccagggtgcatgcccatgccaggcaagaccagtctgcgtccactctgctgttcagacagcccagccagtggcatggcccccaggagcccggactctgcgcccctgctcaggacagcctccgcctccccgaccctgggctgtctcctgcccacttcccaagtgagggatgtagccgcctcctgggagcagaatgaggagaggaagcacctgtggacacagacagatgggccggtcctgcctctgaggcagctcccaggagtggcctactattgaggagtatgacctccatgtggagtcttcccttttccctgagcttctggcagcccctgcctcagtactagaagctccaagagaaacccatggtaggaggaagctgacacccatggctgacctgtctgcccctgggagagascttagggctgccaggacttctctgtgcacatccttgactgactctgcggagggtggggccgaaaccctgtttctgtgggcggggaggtggctgtgtcccctgtgccctgctgagccctgggcggggaggtggctgtgtcccctgtgccctgctgagccctgggcggggaggtggctgtgtcccctgtgccctgctgagccctgggcggggaggtggctgtgtcccctgtgctctgctgagccctgggtggtgagccctgggtggctgcaggtccctgcaggatcccccgtgagtgggggtagggcaaggcagttattttcagatggtgccagagggtggagtttcagatttgtttatgcctgtcggaagcactctggggctagggatggggtgcccagctcagcactgacgttcaggacacctggccaagaggcgcctcagatatccttgtcctgctgcggggggttcactctgtagccccaggcaggccggggtactgtagctttttccaggggatccaggaggggtgcaggcacacggcgcacagtggtcctccgcaggcctgcggtcctaggctggccgaatgtgccagcccacacacaggagggggcagttcacaccgagggctggcccgaggattgtcagggccacaccaggcaaagccagcgctattaatatcaggcatacacaagcccccagctgggtgatcctcttatgcctgtggccttggcctctgaggacggcagtgagtgctgttccctcagtacggtggrgrctycaagggcctcctagctgctgtgcctctgctgacatttggcaggcagcttctgccagccaagggtctcaccccagccmcccggctctgcacccactgtgctgcccacaggagtggtcctgcccatggaagggccagttcaggtggccggagctcctgagctgccctaggggactgctgtgggtctgaggtggtgatgtcccccacggctgcctgcgcctgagcccccacgcatccacccctggggccactctgctgttcaggagcacccacccgtgtcctcgaccatgagcagccccccagcttaccctggcatcaggatctcagggtgccgggcccttggagcagaaggcaggtgagtctcgactggaggtctctgccgtgaggggcacccacttgtgctgtggtcctggccactcagacctgtgtttggtgcatgtctgtggatatcaggaatcaaacaggctggcaggtgctctcgggcaccgggcagagcccagggtcgaaggtgccattttgcttgaggctgttggtctgggcgcgtctctcttgtgttggttacggcttggaaccctccgggttggaattaaccttttgttgttgtggccagaagcactcctgtccatctgtgcacaggaagtgaggtttgctgtgcaactttctcctctgtttttatttatttttaatattctaaagttttttgtgtggagaccgtctcaccatgttgcccaggctggtcacgaactgctgacctcaagcagtcctcccactgcagcctccaaaggactgttcaaggcatgagccaccacacccggccaactttcctgtcaaggggtgctgcttgtgaaccgtggggtgaggctttgtccttggctctgagacagaccagctttggagaaggtagtggggctgggctcggtgcagactcagcctgacgccgtcacaggcctgcggtgaggcgggcttctggcagatcgtcctggcctgcttgtgaccgttccgctgcatgggcaycactcccagcagaagggccagcgyctggctgtcagcagcgtgtgcctcaggagggatctgcggtgacggggttgttacttcagtaggatgaggaagagtcacaaatgcggggttggaaggctcctgctggagaggactgagcaccaggagactaccaatggggagcaggcacggtgccagcccggcctctgccgtctggtgtctgtccctcaagttagtcccagctttgtgcattagcgggctcaccctcggaatccagggtgcatggcggaagtgcaggcagccgcaagggcggtgctgggagcttcgctggggagcctctttgcaagtcagattgtgtcggggcttcctccctgaggttgaagacagtgggtgattccctgcagatgctggggttaggcatagaggggaggggccgcctggatttgttctctgcccaccacggcctccagggccaccagagcgtttctgtctgctgggaacctgctgctgaacctaagcaggactgccccactgtgcacagctgcgggccatccatcaccacctgctgggaggggtggccccgggggtgacccttgcaggcccttttgtttactgctggtgcgttggtcatgtgtgtccagggccgctgggaggtcgtggcttctgtttgctgggtcccgtcttccttcttgactgacagcccttcaggcagacctgagtggggtgcaggtcccattccagcygcagcccccgcatgcggtctcggggaagtgccgtggcacctgctcccccttcagggcaccgtgcagtggtgctgtcccccgggccsccctcgcctggtcgtcttggcgcctggccttgttgtttgtgctcagccctgctgctgacgtcaccactcwgctccagaacgatctccggagccgaggtgaggctgagtgaggctgcctggctgattattccccgtgctcactcccctgatggtggcatggaaacaggcagacctgtctgtctctgaggagaggcacagcgcgttttccccgtcaggtgcagacggcgggtctctttgctgctttaaatgctgccacactgttctctgggcccaggagagctgtcacgtgtcgggctgggctccctccttccactgccccctgtgtgtgcacacggacactgtcctcctggctgtgggtgtcacgggtgcacggggaggagtgcccaggtgggaatcagtgttcccacgctggagatgccaccttcaaagacagactacggtttggtttatggcaacaaagtggcacctgctttaaaaacattcaaatgtgacagaagttgctgttccaaatcttggtggccagagagtgatcatggttagggctggtgtgtgcacacgcttccctctcacacacaccccctcccttacacgccccctcggtctcacacacaccccctccctctcacacacgcccctccctctcacacacgcccctccctctcacacacgcccctccctctcacacgccccttccctctcacacacgcccctccctctcacacacgccccctccctctcacacacgcccctgnnnnnnnnnnnnnnnnnnnnnnnnnnnnnnnnnnnnnnnnnnnnnnnnnnnnnnnnnnnnnnnnnnnnnnnnnnnnnnnnnnnnnnnnnnnnnnnnnnnnnnnnnnnnnnnnnnnnnnnnnnnnnnnnnnnnnnnnnnnnnnnnnnnnnnnnnnnnnnnnnnnnnnnnnnnnnnnnnnnnnnnnnnnnnnnnnnnnnnnnnnnnnnnnnnnnnnnnnnnnnnnnnnnnnnnnnnnnnnnnnnnnnnnnnnnnnnnnnnnnnnnnnnnnnnnnnnnnnnnnnnnnnnnnnnnnnnnnnnnnnnnnnnnnnnnnnnnnnnnnnnnnnnnnnnnnnnnnnnnnnnnnnnnnnnnnnnnnnnnnnnnnnnnnnnnnnnnnnnnnnnnnnnnnnnnnnnnnnnnnnnnnnnnnnnnnnnnnnnnnnnnnnnnnnnnnnnnnnnnnnnnnnnnnnnnnnnnnnnnnnnnnnnnnnnnnnnnnnnnnnnnnnnnnnnnnnnnnnnnnnnnnnnnnnnnnnnnnnnnnnnnnnnnnnnnnnnnnnnnnnnnnnnnnnnnnnnnnnnnnnnnnnnnnnnnnnnnnnnnnnnnnnnnnnnnnnnnnnnnnnnnnnnnnnnnnnnnnnnnnnnnnnnnnnnnnnnnnnnnnnnnnnnnnnnnnnnnnnnnnnnnnnnnnnnnnnnnnnnnnnnnnnnnnnnnnnnnnnnnnnnnnnnnnnnnnnnnnnnnnnnnnnnnnnnnnnnnnnnnnnnnnnnnnnnnnnnnnnnnnnnnnnnnnnnnnnnnnnnnnnnnnnnnnnnnnnnnnnnnnnnnnnnnnnnnnnnnnnnnnnnnnnnnnnnnnnnnnnnnnnnnnnnnnnnnnnnnnnnnnnnnnnnnnnnnnnnnnnnnnnnnnnnnnnnnnnnnnnnnnnnnnnnnnnnnnnnnnnnnnnnnnnnnnnnnnnnnnnnnnnnnnnnnnnnnnnnnnnnnnnnnnnnnnnnnnnnnnnnnnnnnnnnnnnnnnnnnnnnnnnnnnnnnnnnnnnnnnnnnnnnnnnnnnnnnnnnnnnnnnnnnnnnnnnnnnnnnnnnnnnnnnnnnnnnnnnnnnnnnnnnnnnnnnnnnnnnnnnnnnnnnnnnnnnnnnnnnnnnnnnnnnnnnnnnnnnnnnnnnnnnnnnnnnnnnnnnnnnnnnnnnnnnnnnnnnnnnnnnnnnnnnnnnnnnnnnnnnnnnnnnnnnnnnnnnnnnnnnnnnnnnnnnnnnnnnnnnnnnnnnnnnnnnnnnnnnnnnnnnnnnnnnnnnnnnnnnnnnnnnnnnnnnnnnnnnnnnnnnnnnnnnnnnnnnnnnnnnnnnnnnnnnnnnnnnnnnnnnnnnnnnnnnnnnnnnnnnnnnnnnnnnnnnnnnnnnnnnnnnnnnnnnnnnnnnnnnnnnnnnnnnnnnnnnnnnnnnnnnnnnnnnnnnnnnnnnnnnnnnnnnnnnnnnnnnnnnnnnnnnnnnnnnnnnnnnnnnnnnnnnnnnnnnnnnnnnnnnnnnnnnnnnnnnnnnnnnnnnnnnnnnnnnnnnnnnnnnnnnnnnnnnnnnnnnnnnnnnnnnnnnnnnnnnnnnnnnnnnnnnnnnnnnnnnnnnnnnnnnnnnnnnnnnnnnnnnnnnnnnnnnnnnnnnnnnnnnnnnnnnnnnnnnnnnnnnnnnnnnnnnnnnnnnnnnnnnnnnnnnnnnnnnnnnnnnnnnnnnnnnnnnnnnnnnnnnnnnnnnnnnnnnnnnnnnnnnnnnnnnnnnnnnnnnnnnnnnnnnnnnnnnnnnnnnnnnnnnnnnnnnnnnnnnnnnnnnnnnnnnnnnnnnnnnnnnnnnnnnnnnnnnnnnnnnnnnnnnnnnnnnnnnnnnnnnnnnnnnnnnnnnnnnnnnnnnnnnnnnnnnnnnnnnnnnnnnnnnnnnnnnnnnnnnnnnnnnnnnnnnnnnnnnnnnnnnnnnnnnnnnnnnnnnnnnnnnnnnnnnnnnnnnnnnnnnnnnnnnnnnnnnnnnnnnnnnnnnnnnnnnnnnnnnnnnnnnnnnnnnnnnnnnnnnnnnnnnnnnnnnnnnnnnnnnnnnnnnnnnnnnnnnnnnnnnnnnnnnnnnnnnnnnnnnnnnnnnnnnnnnnnnnnnnnnnnnnnnntcccctgatggtggcatggaaacaggcagacctgtctgtctctgaggagaggcacagcgcgttttccccgtcaggtgcagacggcgggtctctttgctgctttaaatgctgccacactgttctctgggcccaggagagctgtcacgtgtcgggctgggctccctccttccactgccccctgtgtgtgcacacggacacnnnnnnnnnnnnnnnnnnnnactgccccctgtgtgtgcacacggacactgtcctcctggctgtgggtgtcacgggtgcacggggaggagtgcccaggtgggaatcagtgttcccacgctggagatgccaccttcaaagacagactacggtttggtttatggcaacaaagtggcacctgctttaaaaacattcaaatgtgacagaagttgctgttccaaatcttggtggccagagagtgatcatggttagggctggtgtgtgcacacgcttccctctcacacacaccccctcccttacacgccccctcggtctcacacacaccccctccctctcacacacgcccctccctctcacacacgccccttccctctcacacacgcccctccctctcacacacgccccctccctctcacacacatcccctccctctcacacacgcctccctcctcacaccgaggcgcatggcggtgagcgtccttcgtttcctggattttatacagatggaatcatctctccttccagcttgcttttctcccctgaccatgctctgaggatgccgttccctgtccgcacctgtgttctgtgtcgttttcgggcgtaactggcatctgtggagygttccatttcctgtggaactccggagcgcggtggacagactgtgccgctgcaggaagctacaaagaggcggtcctgccgtttgcggagctttccctcttgcccccgggggctctgccctgcacagacagtgactgtggttctgagttgctccccatgtgagtgggccatgacctgcagggccaaggtgctgacccctgagagcttcccagggagacctgaaacatggtgctgaggccaccacagccagctcggtgtctcctgggcagtggccacaagtgccttctgccggacctgtgtcttgtctcatggcatcttcacaccaggctctgcatctgagcctctcagaacagactgggcaggcgccacgttgatgcccccccaaccccccagcagggcactcggccatattgagcctccccagaggctgcccctcccagggctccatggccagtcacggccccctgcccacttgaggttgtaaactgacggagaagttggcaggcgcctgagtgccggtccagcaygtgcagtgcatgtagatgccacacagcctaggcctgtgtcttcctcccgttgatttcccccttgcagactttaggggctcccccttaccctgggcaggctcacggcagcccagacaggtggcagcactttcctctctggtgtttgccagatgccggaggtttctgtcttggggacccaggaggggccacagcaagaatgaatggggttccaataaggctcccagcgcagggtcccccatccggcactctgacagccagagaggccaggccgaggcactgtgctgggcctgctgtcactgcaggagaatcaggtcctggctgagccctctgcctctctccctgagcccttcagcctggtcctgtctggggacctcaccctcggtgtgtgcgcacaacctggtctggtctcgcctccacccacacgccgccctcacgtctccttgggcacccagccttcagcatggcagcgatttggctgcccagagagtgtgccgggttgcaagggaacrtggtccattttggggtctcacctgcctttcacaggcccaccttgagtcccctaggggacagagcctggcccagccagtgcctgtccacacagcaggatgagcatggccccaagatagcgcctctcctccttcccttgtccttgtttgctgttcctctgtccttgctgtgtggacagtgatgatctgaggccctgtgccaggctgagcacttgggtctgtgtgtcctgtggcccagctgcaggcaggaggcagggttttttttttttgaggtggagtctcactctgtcacccagactggagtgcagtggcacgatagctcattgcaatctccacctcccgggttcaagccattctcctgcctcagcctccctagtagctgggattacaggcacccaccacyrcacccaggtaattttttttttttaatttttagtagagacgggtcttcaccatgttggycaggctggtctcaaactcctgacctcaaatgatccacctgcctcggcctcccaaagtactgggattacaggcatgagccaccacgcccagcccaggcagagttcttatgtacccccaatgagcctgcccgcctcagccatgcctgttgagggggtggggggggrtgccctgtgggccggccatgccagcgggtacctgggaggtgggcagctctgggccacatccgagtacatccctctctgcagcagcaatgcagagtccctggacaggctcctgccacctgtgggcactgggcgctctycccggaagcggaccaccagccagtgcaagtcagagcctcccctgctgcgtacaagcaagcgtaccatctacaccgccgggcggccgccctggtacaatgaacacggcacgcaatccaaagaggccttcgccatcggtgagagcagcgkgggggtgggacctgctgccggacgcctgcctccggctcccctccagtgcctgtggagcaggagaaggaagccgggcaaccgcaggcagcggcagcgggatgggcacctctgggacctatctgtgccggcagcctgcctgttcctcacagagggtctccactcccgccggcaggcttgggrggcggcagtgcctctgggaagaccactgtggccagaatgatcatcgaggccctggatgtgccctgggtggtcttgctgtccatggactccttctacaaggtgggcccccgcccagctcccccgaggacccctttgtcctctccctgaccctggaccccctgcaaaagtaggtccctggtctcagccccagcgtggctgctcctgggaggcctagagcccctgtccgctggcattgggtgagggccctactgtgcccacagctgctccacagcctcccccaccaggtgctgactgagcagcagcaggaacaggccgcacacaacaacttcaacttcgaccacccagatgcctttgacttcgacctcatcatttccaccctcaagaagctgaagcaggggaagagtgtcaaggtgcccatttatgacttcaccacrcacagccggaagaaggactgggtaggccagggccctgcagagggggcctcggggggctgcaggcacatgagccaggctccgcaactcctgggtttcttcacagaaaacactgtatggtgcaaacgtcatcatctttgagggcatcatggcctttgctgacaagacactgttggaggtaagcacccgcygggaatacccaccccgctggtatctcagccctggccgccctgtccatgaggtgtgcgtcctcctgccctgtccccaaggcctccacactgtataggcctaggccagccactccctaccccaaccccaaccccaggcatgccacagctgggtccatctgccggccccaaaaggcagagcgtggctgcctgaggcagtggttcctctccaccggctgaggcctgtgcgcatacctggagtgtccttggcgttctcgtcccttgccgtggtcctgacggacaggtgaggacccagggctggtgtgtttgagagattttgctgtagctcaagggggccttcaggacacagctgagtgtgactcaggttggcctgatcccagggcccaggtcctgccccttgtacaggcccagaggactccatcrtccggcacatagcagcccccagcctccacaaggcctcttcacgggccaactactgtgtgctgagcatggggacagaccctaaactcrccacgtcccccrttccccagtgtgttggtgcaagttaccccaagcaaagtaaggagatcacatgygcccagccccattcctgcctgattccttagccagccaccatgccatgcctcttcacctaagcccctgacgggcagcaccgyatccccagacacccccacctccccactccttcccacctgccagggtgccctggggaagtggctcgggccaggcccacggaccaggtgcagacacccccacctccccactcctccccacctgccagggtgccctggggaagtggctctggccaggcccacggaccaggcggcctcagtgcaggggctggtcccagtgtctccatgcccactgctggcatctggccactcactggcccgctgtctccaccagctcctggacatgaagatctttgtggacacagactccgacatccgcctggtacggcggctgcgccgggacatcagtgagcgcggccgggacatcgagggtgtcatcaagcagtacaacaagtttgtcaagccctccttcgaccagtacatccagcccaccatgcgcctggcagacatcgtggtccccagaggtgagcctgctgggctgcctgttgggtgggtgtcgggcaggccarcggcccagcccccggtcacccgcccccccatcccgccccagggagcggcaacacggtggccatcgacctgattgtgcagcacgtgcacagccagctggaggaggtgagcggggtcccacgtccccacggcctagcccccagcccctctacccacttctccgctgccaccacccccagtggcctggtcacctcatccccctgcgttcactgtcccctgccaggtgccagccctgagtgtcctgagcctgcttggccagtcagattgtccagcccagaccccatcccgttgtgctgtgcagggcctgggttccctgaggaagctggggtgggggtacaggtgctcaggacccagccgagggtgcagcccgctcagcacacccagcctgagcttttgggaagacaggcatgacctgctggcccaggattgtggggtttcactgctgagtcccacgccaggccaggctcctctctttctcagggggtcaccccaggagcgacacccccaccagaggtcccctgctccctgaggcattctatggctgggccttggagcctgagtggctctgaacacactccctaccaggatgttgaaggcctgaggcctgcagaacagagcccagggtcctggctctgattgccccaacgcagaactgcaggtctggcccaggtggtccccaggttacaggcattagaagcttgccaccccccatggctggctgtgtccccgcgggcctgcagcatgtccattcctgggtgggggtggcctggccgcctgccctggtcactgacgcgccaccgttcccttgtgtcttcctgtgttgctgccacagcgtgaactcagcgtcaggtaagacttgcacagctgtctgcacagatggaggcacttccaacacctccaaggagctctggggtctgggctgtgatccagccaggcagctggctcttccccagtcacagaaggggtggtgtggagtggtcccagccctgcttctgcctccccttgctggcagatgaggacactgaggcacagagacgtgaagtagcttgcccagcgtcacggagtcctgaccctgtcctggccagactttgctggaggctcccctgactcctgagtctgtctatgggatttgaccccagagagcacagctgtcctcctgagccagcactgccaggcctctggggcagtgactacagacatgtcccagcagccagggagcctgctgtacctcctgtgcccagcctcacggaccagtcagctttccctggttgcaggtggagggcctcgcgcctgtcctcccacccacccgggtcctgcttgccccagctctgtcctcgcagcccgcacagctctgccagcaggaactgggcaactgcagcaagaagcttgggctgggccggggccgcatcccactgtccctccccaagggcaggcatgcaggggggtcagccacaagggacctgcccttctccctgccttctgtgggttgggaggctcctgactgagccacctggagggagagccctcacattcagagccctccaaagagtttgccaaatgttggaaatgcctccagggcccgtccaccagccgtccagcttccggtgcctgcatgagtctccgcttggccctctcctcggcctaggaacccgcaggtcttgtcccgtcaggttcctcctgaagcttttgttctgagaggaaaaactttccagggtttcaaacttggaaaaacacctgaacgcagccagacacattttccgtcgtctggtcagccaaggaagtgttggcctgtggctgcactcacttccttcagccccaggaagccttggtcgggggcaggagggagggtcaggcagggctgggggcctgaccgcccacactcctcctcaggcctgcggggaacgccctgctccccaactaagcagccttctctttgttctcttccttctctctgtaaacccccgtttcctgccttgttccctccctgaacatgctcttcacctggcaagcagaggaagctacgttgggatatgtgagcagtgtgctccgtggtgctgctgtgtgacccgccttcccgtagccccttgccccgctgctcccgctaggccctctttcctgctcctgccccgcccctttccctgccgctgtcacgcctctyttctgccctgccacaccccattyccggccccgcccctttccctgccgctgtcacgcctcttttctgccctgccacaccccattyccggccccgcccctttccctgccgctgtcacgcctcttttctgccctgccacaccccattcccggccccgcccctttccctgccgctgtcacgcctcttttctgccctgccacaccccattcccggccccgcccctttccctgccgctgtcacgcctcttttctgccctgccacaccccattcccggccccgcccctttccctgccgctgtcacgcctcttttctgccctgccacaccccattcccggccccgcccctttccctgccgctgtcacgcctcttttctgccctgccacacccaattccgtgccctgcctctttccttcccctgccacacccaattctgtggcctgtcgctttcctcttcctgcccctgcatcaccccctttcctgccccgccccattccctgcccctgtcatgcccctttccggctttgcctcctccctgtcccacctctttcttgcctccaccccgcccttttcctgcccgctcctagacctgctgctgccccggccatccccaggcttgggcagcggggcgggacgggrcagccaagagacactgagccagctttgccccccacccccctctcttgaggggccgcgcaccacctcggggaggagccagggcggggcctgaccccacaaagctttagttcccccggggagaggctggggacaagctacccattctggggtatgacacctatcagcacgtgtgagcccgccctgtgcccggcccacttctgcttcctcttagcgcaggaggggtcccgcactgggaggggccctcacagcctaccccgctagctttctgcctgatggtgagcttgccccgttgttcgccgccatctttcgcctttgcctgacagctcaggtagggcgacgtctccccccagctcagccccaggcagaagtcaggcccgctctgcacctcgtgctgtgcctggcccgtgtgttcccctcacagtgacgcacagccgtcctgtggggagggagggctctgggaaaagacccccttcttgagtgttccccatcggtttgtccccagggctgcgctggcctcggcacaccagtgccacccgctgccccggacgctgagcgtcctgaagagcacgccgcaggtacggggcatgcacaccatcatcaggtgagggcccacctggggacggggcggccccgggcgcgtgctcccgctcaactgttggccccacagggacaaggagaccagtcgcgacgagttcatcttctactccaagagactgatgcggctgctcatcgagcacgcgctctccttcctgccctttcaggttcgtagcccgtagcccgcgaggtggagggtgggtcttggagccggtgcgagctccctgcgctcaccggagtcctcaccctgcaccccacaggactgcgtcgtacagaccccgcaggggcaggactatgcgggcaagtgctatgcggggaagcaggtacctgcctgggcacacctgggcgcgggacaggctgctggggcgggatgtgggcgcttakcctcccctccccgcagatcaccggtgtgtccattctgcgcgccggtgaaaccatggagcccgcgctgcgcgctgtgtgcaaagacgtgcgcatcggcaccatcctcatccagaccaaccagcttaccggggagcccgaggtgcctgggggcagccggggtgatgagcccgggggtagggggcagagggagctcacagcaaggggacgcagggagccccacctgcagcctgacccctgctgcccgcagctccactacctgaggctgcccaaggacatcagcgatgaccacgtgatcctcatggactgcaccgtgtccacgggcgcggcggccatgatggcagtgcgcgtgctcctggtgagtgagccctgggtaggcggggcaggttcaggcagaggtgggatttacctgcccaatacactcggtaggaccacgacgtgcctgaggacaagatctttttgctgtcgctgctcatggcagagatgggcgtgcactcagtggcctatgcatttccgcgagtgagaatcatcaccacggcggtggacaagcgggtcaatgaccttttccgcatcatcccaggcattggtgaggctgcccgggcccttcagccgcacatgagggcagggtgggtggccctgggaggccccaccacactggaccccccccccctttttccagggaactttggcgaccgctactttgggacagacgcggtccccgatggcagtgacgaggaggaagtggcctacacgggttagctgcccagtgagccatcccgtccccaccaccctcctcctgcctcctgacccaggactgctgaatacaaagatgttaatttttaaaatgttactagtataatttattctatgcattttataaaataaataaagctttagaaaaatgaaggtgtgattggttacagcacaggagaggtgtcctggctgaggcatgcatttgtggagactcccatggggagggagggagggagctgagggccctgccttctcccctgcaggaccaagcattcccagtcttgcacttgtgccagatgaaggaaggggtagaactgggccctgcagctcctagctctgctagatggggcccctagaacccatagcttggtggccacctggcctggacctagggaggggacagggccccctggtgctctgggtctcacaagaggcaggctgttttgcccccacccacaaatttgtaccatcagggtcctccccacagttgggggggggggagggtccttcccgtcaggacaagtcgctggaggcagcaaagccaggaggcagaccagggcggaagtgggggcctgcgcttggaggcggggccacccggggcccacgagcccggagccactgctgctcagggcccgcctcgctcacccctccagacctggaggcccacccgcatcccgtgctctctgccgtgcccacgcccgcaagcgtgggttcccttaggtcctgcccaccctgctttccgagcaggccccccccgggctccccgagaggagtcgccgccgtggtttactgaggaagaggaggtgcacgcgcggcgcccacacgtcgggccccggagaggcccagataactgaatcagcctcccggggctcagccgtggagctgagggctgatgctggggactcagccgtgggccaggcgcatctgacacgggacacggtcgtccccgtcctctcaggcgccagtgtctttctgcgtggaagtccacggccaaaagcgtggcgtcctcggagcctggcacctcgattatgccggatcccggatcctggacaggggtctgctgacgaagggagggacggcgtaaggccggtcttcccagatgccgcgagaccttgcgctgcagtggggtctcccattgcccatgcgaccaggccgggtgggcgctggtccccacgtggggggcccatctgcgggtgcagcgctcccgccactcgcccgccccaccggtcccgattggccacgcccctgcccagcccccgctccgcctggtaggccaggtcccgctgggccccaccgagtgaccacgcccctgagccggccccgcccccgcgctggccccgccccccacccgaccctgagcagcggggctggcgctagaagtggtcccttcctggcgttcctcggtcacggagagcggggcgcaaggaaggcatagccggggggagcggggagggtggtccgaccccgtcttggagacggaggagattcctggggcgctgggcggacggagagttttgccgcagcgcctgttaaccgcggtcccctggaccaggagaaacagggccgacaaccctccctggcaagggtcttgctgcccgccacccagtgtccagtgctcggcttgctgttaacatttctctgtaagaatcccatatataaaatacttaacataggccgggcgcgctgcctcacacctgtaatcccagcactttgggaggcctacataggttcgagaccagcctggccaacatggtgaaacccccgtctctactaaaaatacaaaaaattagctgggcgtggtggcgcgcctttagtcccagctactcgggaggctgaggtacaagaatcgcttgaacgcaggaggcggaagctgcagtgaaccgagatcgcgccattgcacaccagcctggatgacagagcaagactctgtctcaaaggaaaaagaaaaaaaaaactgaacttaataaacgtggattctacttaattaagaaaattcaaagaccaagccagaaaaaaacgtctgacaacgctaaggctagaaggggcagcgagaagatggggagcctctttgcagggcagtgtggggccaccagtcaagggaaggcttccagatcccgctcccagcgatcccacccgagacaactcagcagcgacattcaggcagctttgtttccacagtgagaaactaaaaacctgtggtcagtttgcccaggaccgactgtgattaattcgtgactgttctgtacagaagctaaaatgaaccagacctaatataaccacacggcttgatttcttaactactactgtatcaaatgaaaaacttaggcctggtgcagtggctcacgcctgtaatcccagcaccctgggaggccgaggcgggcggattacctgaggtccggagttcaagatcaggctggccaacatggtgaaaccccgtctactaaatacaaaaagttagccaggcgtggtggcacatgcctgtaatcccagctactcaggaggctgaggcacaagaatcacttcaacccaggagatgaaggttgtagtgagccgagattgtgccactgcactccagcctgggccacaaagactccgtctcaaaaacaaaaacaggccgggcgcggtggctcatgcctgtaatcccagcactttgggaggccgaggtgggcagatcacaaggtcaggagatccgagaccatcctggctaacacggtgaaaccccatctccactaaaaatacaaaaaattagccaggcgtggtggcgggcgcctgtagtcccagctactcgggagggtgaggcatgcgttttcctaaatggcgtgaacccaggaggcggaggttgcagtgagccaagatcgcgccactgcactccagcctgggtgacagagcgagactccatctcaaaaaacaaacaaacaaactcgtaaggcaggtggtgtactcagtactatggtgtagtacaatttatgtaaaaaggtataaaccaatagtacgtcttactggacctgacagtggtagacagagtttaaagctatggaagcagaggatggaaatggggagagacgcaaaacggtcttggatgctgccatttttttaaaatggaaaatctgactcaaatttttttttttttttgagacggagtctcgctctcccacccaggctggagagcggtggcacgatctcggtgcgttgcaacctccacctcccgggttctagcgattctcctgcctaagcctcttgagtagctgggactacaggcacgcaccaccacgctcagctaattttttttgtattttcagtaaagacggggtttcaccatgttggccaggatggtctcagatctcctgacctcatgatccacccacctcggcctcccaaagtgctggggattacaagcgtgagccaccatgcctggcccttccttcgtttttcttaagtcagaatagaggatttcaagatgtttgttacgttattctgagtttttgttagtttgttgacaggatctccctctgtcacccaggctggagttcggtggtgtgaccacagctcactgtagcgtggacttcccatgctcaagtgatttccctcctgacgagctgggacctcaggcacggctacacccagataattttaaactcttttttgtagagacacgatctcactgttgcccaggttggtcttgaactcctgggctcaaagcaatcctcccacactggcctcccaaagtgctgggattataggcatgagccaccacgcttggcctctttgctccagtcttggtatttagaaaacggaggtgaaaacacaatcaagaggagggggcatttatccacatctggaccaggcaggagggaagcaaggttccagccgcaaggggtgtggagggctgagatcagctgctgctctccaaaaccagggatctgcgggactagcgagtaagacatacgtggggtccgcagtgaaaacatttattttacaacagtaatctttattttaggccaacattcagacatacaagacggagatcaccatgcggaaccagcctggcccttagatgtgtgtgctcgagccaggatcagccggagtctgacagcgcctgcaccccaacacggtcggattccaggacgccagtgacaaaaccagtgcatggacaagcagcttccatgcgtgtgcatttgatttttaaaaacaatacatatttcagtgttaacttcccccctcacctggcttgaaacattttccccattttccagggaaacaaactctaccaaaaggtgccgcctgcaggaccccgggcccagccccttctggaggtggtgctgtgtggactcctctggggcggacccggggccagcacagggccccttcccaggccgcccttcagatgcagctttgccactgaccgtatctgctgctcagaaaatcagctttcatgtttcaaggcagggaagggcttccagtcccctcctcgatttcacaccgggacacacacctgggtcaggtgagcatgacacacagcccccaggatgggcaccccaccctgcagagcagaggccaatgctggtgggggccgtggcagtgccctgggcacacaccctctgcacacagtgggctcagcgcttccttctgtgcacctgctgggaaagcctcctgcaggtccctgcccgactcccaagaaaccagaggccatttcagagccacctttaattgtacttgtcacttcaccaggggacagcagcatgaatgacactcctgctgcgtgatatatacatatacacatatgtacacacacggacacaccacagcccacactcacagcatgtgacgacgcaaactgttgctggtaaggacagtaaaaatgtagcttttgccaattccacaggagaatgatttacaaccaaaataacagacacaggccagtcctgcgccacaggggttcacagctctgaatactgggaaagggtgagatcagtcatttcgtgtcccctcacgagatgtccccacagtaggatgcactgagtcagagctaagggagggtggacaagcgctgaactctgcccgcagcacccggaccctccagtggcagcctgcatgctggtgcccttccttgcagcacaagcctcgcccggaacagaacgcctgagagcagcctcgacggcgtgaggctccagggcctcttctggatggcagcagccgacgtgaagacgaagcttttcctgctgggcacgtgtgcatgccagttcctttttctagtaggtccccactgggtgctggctgcactaacaacatagagaactaggaaagttcacaaacactgagcagtaatatctaaagcagtttaaaaataaagccaaaaggaagacaaaaaaatcccacgtcactgagtggagacaaatctatacagcagcagctgccgtgaaagggcccgcagggccgctcctacgcctcctgcaggtcggaagcagtcagtgctgcccggaccccctcgtgaaccggacgggcctcaaagcacgaccccagagggcccctggcagcccccagcagcggcgtccaaagggacattctgtgcccatggccacacttgctcacagcattgtctgcggcccgagagtgaggagtcggggtcccgtcactgccaccagcaaaagcaggcaggggtgctgggggcgtcctgatctgttagcacgtggacagggaggcgcggaagctgccccaggactcaccacctcttttaattatagggaaacagtccactcaagaaagagagaaataaaacccgggaggatctttttccttaaattaagacaaagccttaaagccaacagggcagagcgctgaaaacggttctgcttctaggtcaggcagggggaggaactccaggccccgagtgtctgggcttcccgggggtcgtctaatcacaatcaccaccgtgagaatggccacaaccatgatttattaggttttacagattctgcaggggactgggttccacaaacctccagacctgctcctctttcccaccctaccccaccttccgcagggagctgcatggttctacaaaatggtccactggactctgtaactgaaaagccacctggcaaggggcccactctgatgggtaccgaagggccttggagtgttctagccacagagctgtgtgcaggcccaacagagggcctggtggggctgagctagggcccccgatgggcagctttctaccttaggtccaagcttagaacctggctcttggccagtctgcggaaaaataactcacgtcctaagctacatctacaaaaattgcaaaggctgagtacagccagcatctcaggctgaacttgctgctgcacgaagcggcacggaggcaccccactgtctcgccacctcacctttcaggatgggccaaacaatgaatttcttattcttttaggagaggtctgattttgataaattatttctaatttaatatcacagtgcatatctctcctcttgtcaay

SEQ ID NO: 95093 - DNA, 113011 bp, Homo sapiens
  misc_feature (1)...(113011): n = A,T,C or G
atcacacacacacagtaacatgaaggtacgttctcacacaatcacacacacccacacaaacgtgaagtacgttctcacacacaatcacacacaccaacacacaggaacatgaaggtacgttctcacacacacacacccacttacactcacacaaacatgaaggtacattctctcacacatacacaatcacacccacccacacacacaaacgtgaagtacattctcacacaatcatgctcacatacccactcgcacacacaaacacgaaggtacattctcacacgcacacaatcacacacacccacacacacacaaacatgaagcaacattctcacacactcgcactcacatacccattcacacacaaatgcaaacgcacattttcacatgcacatttacacccccacacacaaacacgaacatatgttctcacacacgcgctcacacacaaacatgaaggtacaattctcacacacatgccaacatgaacgtacattctcagacatgcacactcacatatccactcatacacacaaatgtgaaggaacgttctcacacacacacactccccactctcacacccacacacattcctcacacccctcctcacattcacagccctacacacacgctcttacacccatccacagtgcccaaggagtgaccctgtgagagtcagggaggctccaacacggggcagaagggagagaccagggacagagacaaagaagggaggacacagggtcagatgggccagtgctgtcgatactgttagaggaagactgcgctggagtcgcggggccccagatgcagccatggaggggactgggggcaggcagccagccagctgtgcaggccatgctggggcagaagtgctcacggctgctcagctgtctgctgtgagataatggtaactccagttgatttgttgagatctgcccaccatgttggtcccatgaatcccctacttcctgacaaggatcctgactaagggttagtgctgtcactgcaccacagagacacaggcttgtgggggctgagtaattggtccgaggtgctcagctctcatcaaggccatgctcaaaactgagctctctgattccagggagccagctttccctagggtaccacacacctctcctccaggtgacaggatccaaactgctgagcctctgagccagcaggaatggatgaggggtgtgggccctgcacaggatgcttgagtatcacatgccacatccccccggtccccctctccactcccgttactgctgcaggcacaccccagcagcaccttgccaggtatctgcactgaggatccctcgtttcctgcccagtccgctcactgcttagcctcctttgcacaagagccagggagagaataccccaactggcaacccttaaccaacagggaaggatgaaaggaggacgaacacccacctttgccagccctccagtggaaagctctgaggtgccttctgcaaggctcatcagagggtcccagcaggatcaaggccccctcccacaccagtggccaactccgtcacaaaccctcatatttaccggctttcctgccttctctgttttgagcttcccaggctcctgctctgtttccctggaatcacttccccagttgaaccacctgcatgcaggccgggtctcaagctctgctttcaggccccagacagggctctcctggtgcccagcaccaggggagctaatgatcttctctctcccacttctgttttcccccaggacacagagttctgctctgatctattgtttgctggattcaagagccaccacattccccgggggggccaaaccattcttgtttatccagtaacaattaattctcagccatgatttctagtcttgaaccacacaaacaaaaagttgccttcagcaaagaggcatcccatccaggcagatgctggattgaggttggggggggtcaggatgccctccaagcttcgacctaagtctatgattctgtcttccttttaggacaagccacaggggcaagtcacccatgcagccatttgaggtcctgagttgtgtgtgtatagatttcctgtatcatttgattataaaagcgaagcatgccagttgtccaggttacatcaatacaaaatgtatagcttggaaagtgaaaacagctcccccataatcccacccttttcactcgagggtggatatttttcattgccctgggaccaggacattctcagtatcagggaatgaggccagctggtcccttcaaggacagccagtgcctttataaagtaccatttcttcttagggagacttccattcattcaatgactattttttgagtatctactaggtgccaggtactggggaagccactgtgagtgagatggatgaggccctcgcggcattttccctgatctcctctgtggcaggatgtcaagcagctctcttgcccaggaatattcacccagatgcttctggctccccgggagtcctcgcaagggcctactgctgtcccactgcgtttcccatatccacagggaaaggccgtgccagaaccctgaacgcggagcagggatgggaatgtgctgtgctcttcctgcggctgggcctttgcagggaggctccagccacctggaacgcctgcctttcaggcccatcagatccttccctcttgccctgaaaggccctgtctctgatcacctcagccagaagtcacccccaactgtaacctgtgtacacctgagggtctgcctcatgagtcaacatggtgccttggcagaactataaggctcctctggtttccccagtgcccgctgaacaggggcccacagaggagagatagggatggtggaagaacagggagtgggacagtgaagccagcaggcaggggctggagaggcagggatcaatttgttgttgttctttttatatgagggtgcctctgtgtggaactctctcccttcatggggtgggaggctggggcatgagtggtggcagagggcccagcagagaaccctctcagcttaggagctgggcatggccttgcggacagggtgccacactgagaatcacagggctggcatgtatgccaaggaaggggaagggacccacagagggtgcaacatggtgtctcttgtgccaaagcaggaccaagcacaagatttatcagccttttaaaaaacattagcacatctctcccccaacccccacttttttttgagatagggtctcattctgttgcccaggctggagtgcagtggtacgatcttggctcactgcaacctctgcctcctagggtcaggcgattctcccacctcagtctcctgagcagctgggacttcaggcacccgccaccacgctcggctaatttttgtattttttggtagagacagggttttgccatgtcagccaggctggtctcgaactcctgacctcaagtgatctgcctgcctcggcctcccaaagagctgggattacaggcatgagccactgcgccttgccgtacattacatctccctttgtaaaacataaaagtcatgtcctctttaacatcatgtgacaattcaaaataaatgtttaaacctccagcaaagtccaggcatgatggctcacacctgtattcccaacactttgggaggctgaggcaggcagatcacttgaggtcaggagttcgagaccaacctggccaacatgatgaaaccctgtctctactaaaaatacaaaatttagccaggcatggtggcaggtgcctataatcccagctacttgggaggctgaggcaggagaactgcttgaacccaggaggcggaggttgcagtgagctgagatggccactgcactccagcctgggcgacagagtgagactctgtctcataaataaataaataaatgccttcctttttaaaaaacaaaaacaaaaaacaaaccacaaataactccctccaaaaaaaatcccccccaaaacccaaaaacctccagcaaattaaaacaatggggcagcccagagcagtggctcatccctgtaatcccagcactttgggaggctgaggtgggcggatcacttgaggtcaggagttcaagaccagcctagccaacatagtgaaaccccatctactaaaaatacaaaaattaccccgggcttggtggtgtgtgcctgcaatcccaggtattcaggaggctgaggcaggagaattgcgtgaacctgggtggtggaggttgcagtgagctgagatcacaacactgcactccagcctgggtgacagagtgagactcagtctcgaaaaaataaaaaatagaaataaaataaaacaatggggcaaagttttgctttatttaaattaccaaactcctatatctgatgttaggtcccctacctttggaatcaaagccctgcgaagtatgggctgaaggtggcgccttttcagacagagtgtgagggaacggtagaaacagcagtggcaggatcgattctctaatggatccattccccgagggatgcaaggtgatgcctgaggttctggaaggggtgcccgcggataactctcaggggcatggggtggcagctccatccagggtctggatagccaagtttctctcccctctgttcattccttcagctctccccaggggagatgaccccctattgctgctggctgtcctcagcacttaccttcccacacatgcttttgtcccttttgtcccaaaacattctatctctttcctcttcctttatttaaattcccaaagcctgtagttgatcttagcacggtgttctgtcaaatgcaaggaaaataatttatactatggtgtaagagactgataggtttaactattcaaaggagcattcgcatctttaagggacagtttgtgaactcaaacacatctcaaacgggtagaatgtgcacgggaaatctcttcgaagcagggtctcaggaactcttccagttccacgtgtgtagtgcccaccgggccaccgccacccgcctcctgggagcaggacagggctccgctgccgagccctctgcggaaagctcaggcccggcgctccggagtctgggctcccggggtgggcggggatacttaggccccacgtgccccgcggcggagcggtccccaaacctgagccctggcctctgccggcccggaatgaagccgcggcgtaggagggggcggcggggtgcnnnnnnnnnnnnnnnnnnnnnnnnnnnnnnnnnnnnnnnnnnnnnnnnnnnnnnnnnnnnnnnnnnnnnnnnnnnnnnnnnnnnnnnnnnnnnnnnnnnnnnnnnnnnnnnnnnnnnnnnnnnnnnnnnnnnnnnnnnnnnnnnnnnnnnnnnnnnnnnnnnnnnnnnnnnnnnnnnnnnnnnnnnnnnnnnnnnnnnnnnnnnnnnnnnnnnnnnnnnnnnnnnnnnnnnnnnnnnnnnnnnnnnnnnnnnnnnnnnnnnnnnnnnnnnnnnnnnnnnnnnnnnnnnnnnnnnnnnnnnnnnnnnnnnnnnnnnnnnnnnnnnnnnnnnnnnnnnnnnnnnnnnnnnnnnnnnnnnnnnnnnnnnnnnnnnnnnnnnnnnnnnnncccgcccgcctcccgcctcccgcctcccgcctcccggggcctggagcgcgcgtggccccggagccgccggcgccgcgcgaggaatagctgtgcagcacgccgagcccggactcggcatggctcggctcggcgcgggcgggcgagaggatgctggcgggcttccccgggctcggccgcgctcccgccgtggagggccccgcgcgcgcccctagcagccgccgccgccgcggtgcaggggaggggtccggagagccgcgctcgccgccgcccgcgcctgccggcccccgcacggcccctgcccctgagcctcagccccagggcgcggcgcgctgggccggcgcccacggatctcccagccctcgtcgccgcctcctccttccccctgcggccgggcgcccgcggatgctgaggggcagccctgcgcctctcccggtcggatcccgggcctgacggcgggagatcgcgctccggccgggccccgaggcgctgccggggcggcgcggctctgcggggagcagccctcgggcgcgccgagctctcccgccccagcccgcgcggggaccgtcccggagcacgcggtggccgagttcccgcacaggtaaacgcaggggcagggccaggcttccgggggggaagacagcgccccgagcgtgggaagggggccgratcggagcccgagcctccaagggtttggtggaaaaaggaagtaaacagaaggaaggctcaggaatcccccacgatggtcctgatttctttccggcacattttatttacagcttctaaggactgggcctggagggaatttaggtgaggaagtcggggactgagaaagaagagatgacagagagaaaccggttaccagggatggaaaggcggctaggcccttccacaagccagggacaggaaattgagtgtctggcgtggacaggactaagtgtgcctgcggtgggcggtggtgtgagccgggggtggcagggaaggccctgggttgggaggctcttgcagcagagatccttttatgagggttagggcgggtcatggggaaaccgcaaggtaggagggaagaggtgcttctactcagcaatgcccttttcagttctagctgatcagtgctacctgtgctctggaaacccgctctgcgttcctgctggaggtggcctcccctccgccccagacaagaagaggccctcagccctcccccggtctcagagagccctgagaggaggcccagtccagagctcttcctccgttcccagtccacttctctagggccagtagcagacaccagccagtatgccgaggaaccagggcttctccgagcccgaatactcggccgagtactcagccgagtactccgtcagcctgccctccgaccctgaccgcggggtgggccggacccatgaaatctcggtccggaactcgggctcctgcctgtgcctgcctcgcttcatgcggctgactttcgtgccggagtccttggagaacctctaccagacctacttcaaaaggcagcgccacgagaccctgctggtgctggtggtctttgcagccctctttgactgctacgtggtggtcatgtgtgctgtggtcttctccagcgacaagctggctyccctcgccgtggctggaattggactggtgttggacatcatcctcttcgtgctctgcaaaaaggggctgctcccggaccgggtcacccgcagagtgctgccctaygtgctgtggctgctcataaccgcccagatcttctcctacctgggcctgaacttcgcgcgtgcccacgcggctagtgacacggtgggctggcaggtcttctttgtcttctcctycttcatcacgctgcccctcagcctcagccccatcgtgatcatctccgtggtctcctgtgtggtgcacacgttggtcctgggggtcaccgtggcccmgcagcagcaggaggagctcaaggggatgcagctgctgcgggaggtgagtcctgcccactgtccccccacagcgtcctctcctgcagctctcaccaacttgggacctgttggagttgctgtttgctttgcctttgagtcaaaatgtgtcctgggggcctccrgggctctcacctctctccctagtccctgccttttcacccctgtgccattacccggagtctgcctgtgcttggccccagggaaaggaggatgtcagggcattgggcctcagggccactcttcacctgtgcccagtctaagtgtgtgacaggaaggcccacccagggctggtcttgaggcagcattgtcctggccattccctgtcagtgaccctggcaaggaggacctcccttgggaagagggctccttgattcccatctctccccagcactgactagctgtgtggactcagtgcccctttgtcaaatggggataacgtccgctctgcctgcatgacacggttgttgtcaggattgcaggagatgtgggggaaagcgcattaggatacgtgaagggctgcacagagggaagacgcagttgtcatatttcctgcctccgggagctcggggtgcctggggagttctatgaagtggagaatggtggtctccccactgaaggtgtggtgtggggatgcaaatggggacagtcatgccggccactgtgacgtagggtctcctggtcctaaagcacgcattctgctggtcctggagcacgctttctactggaaggggtggaatttcggcctcagcttaactattatagtattgtgttcccaccaagtgccaggccctcaggggctgcagagaccaggggacctgagggacagtaggcagtgtgtgtccctggggagccagcaagccggtgaccagagaatgaggcggagatgtctgcatctgggtttggtgcccagcctgccagcctcgtgccaatgatggtcaagagaggctcccccacttcctgcccctgcagtgctctgtctggtagagatgtcttaactcccacgccagctctgttctgtggttagtggggctggggtagagtcagctctgaagcggtgaccttctgggtgtcaggagaggcagggcgtgcccagaatccttgctgactgacgtgagcctctagcagccatggaggtcagtgcctgggtcctggagaccaggtgctatgtgcaggcccagggtggacagacagaatcttccactcctctgctgatttctccactcatgtctcatcctgctgatttgttctagaaatgggtagaggatgttaacataggcagggcctggcagggcatctagcccagactacccattttacagaggaggaaacagagatgagtgataactggttcactgtcacccagcactttggtggcagaaacaggacgggagcccaggcattgacccccagcccagggctcatttgtgtatgttccttggagcactgagagctgcctgagagcaggagctttgcttcccaccccacctcctggagacagtggctatgtgctgccctgccgtccccaccccaaatctctgtagagggggctgtgagtttctggtcattgactaggtggaaacaccagtcatatctcttcaggccatgcattagccagtcccaggttctttttttttttgagacggagtcttgctttgttgccaggctggagtgcaatggcgcgatctcagctcactgcaacctccgcctcccaggttcaagctattcttctgccttagcctcctgagtagctgcgatgacaggcacgcgcctccacgcctggctaatttttgtatttttagtagagacaaggtttcaccatgttggccaggatagtctcgatctcttgacctcataatccgcccgcctcggcctcccaaagtgctgggattacaggcgtgagccaccatgcccaggcatcccaggttctaaggtctgaggtctgaggatgactggtctctctagctccatctcctcaggtggacaaggagcttattttgaggctcctggagcttccagggaaaaggactgagaaggtatggccacagggctgggccggggcctgggtgccccaccacgtggctactcggagatcacttctaaactcatgattgttctcctttgagtattgctaagacataaaaccctaaaacttagaaaacagaaaaaaaaagatagaaatcaagaataaaaatattagcrtcccaggggagcctgaccttggcatgcaagcagtgcctgggaggcagctttgggaacagagcaggaggggcagagagctctcaaggtccgattgggagcctgagatcgaaggcaggaggccccagcttacagtgggctgtgttccagaagcttctgagtcactggtttgggactaatgtgactttttaaaaggtgcctgggttcccaggcccacccaccagrgtcttcctcaactcacagcatcccggcatttggcctctgaagatggtggaaatggggccgggcatggtggctcatgcctgtaatcccagaactttggcaggctgaggcgggcggatcacctgaggtcaggagttcaagaccagcctggccaacatggcgaaaccgcatctctactaaaaatacaaaaattagccaggtgtgatggggcgtgcttataatcccagctacacaggagactgaggcaggagaatcacttgaacctaggaggcagagattgtagtgagccgagatcgcaccactgcactccagcctgggcgacagagtgagactccatcaaacaaaaacaaaaacaacaaaaaacacaagctgcagcagcctgtgttgctgtggggagggacacccgggacagcggtctcccctgagccctggagtgaggtgtcattcatctcccctgctgccgttgcctcctgggatgtgggccccatcaaggatcgggggcaagggctggaggacaggatgcaagaaccaggggaccaggccccttctggtcagggtaggtcccagaactttctccagaccccaggcaccgcctttctcctacccatgtgcttgcccttgtctttctctctcccatcccctgtcggctctggctggggactccctccagggtcagtgggggatgaacgcagtttcccagttcgaaatagacacctggatttctggggtcttgtgagttttgtggttttgttgctgctgtcactggcagcatgaagaagcattgccagtgtcaaaagtcttcttcctctgcagcccttatccccccatgcccatgcgcagctctgtggggaaggacagaaggtacacatggggctgttggcagcctgagaggtcagaggccagccagacaacctgtcctgggctcctcgcaggaggccagtgggtggggttctgacaggaagagcaggtgatcagggagtgtgggatggggtggggctggggccccaccaatgagttaatgagtgaatattgccgagcagcatgggccttgcagcctgcaaggtcaggggataaggaggatgaggccatctgacactcaggctgtgctggggcggggaggatgttctgagagccaccttgggtgggcagagacctagccaatggttctcacgacccatcctctagcccctgcctgtcccccattcctttttttttttttttttgagacagagtttcattcttatttctgaggctggagtgcaatggcacagtcttggctcactgcaacctcctcctcccgggttcaagtgattctgctgcctcagcctcccaagtacctgggattacaggtggccgccaccacgtctggctaatttttttgtatttctagtagagacaggatttcaccatgttggccaggctggcctcgaactcctgacctcagataatccgcctgccttagcctcccaaagtgctgggattacaggtgtgagccgctgtccagaggagggaacagaggacgaaacagagatgggtgataactggttcactgtcacccatcactttggtggcagaaacaggacgggagcccaggcgttgactcccagcccagggctcatttgtctgtgttccatggagcactgattgctgctccatgggtcccccatcccaagaggcaacacaggcccagagcagccggaagggaggacagatggatcaggaggagccgaggctggcagtgtttgcccatttcgctcccctggcctgggtcctgccccaggacctgttacggaattacttgccctttactgccctaaactgcccctgggctgggtgaggaggaaggaggggrctgggctcaggaccaggacctgcaggaccagcggccaatgagtgcggacwatggggaaggcagccaggatggttgggggtggtggtgggcggggcgtgcctttagcatttggcaaagtagggactaggaactgctgacaaatattttgtacccttacttcagagcagaaaggctatttgggagcaaaattctctcatggaatgaagagcctgttaagaccttttttcaccaagtaaaacatgaggaagctgtggatgtgcagtttctttcacacctgcaaattacacagcaatcattcacccagcaaaggaacatttgctcctaggggctggagggagctgccgtagggagggtgagaggaaactgaggcttccagagacaccctgtctgcagacggcaggtagctgttgcatgcacctcatcccatttaatcctggatgttactggctccatttcacagataaggggactgaggctcagtgaggttgagaggaggtagtggggctggattacaggggaggggtcactgatgagtgagaaaggtgggttgggggacttccctgaaagcctctctttctctggaacccaggcatctgggcctcctacttttctggctgcccccaaatgtctttgctaagcaacgtagctgaacagtgccaagagatggcagtccctaaggtataacaggaggcacccccttctccccatgggaattggatgcaaaaagggagaagcccatgacgatgttccctgtgggcacgtggccaggagtacttgagaaaggcagggggctgaatcgggacaggagctggtgtgaggtgcggtgggcaggaagcagcaggcctgggggctttcagccttcaggaagcaggctgcagggagaggtgtgcaggacacagagcaagaggaggcaaactcaagccagtcctggctctttggccctgggctcctccactgacccgggacgggaaagaagccgtcatccctccgtggagagtatgcagatgggcatcagtggagggtccagggaccagaacaatgatgacgtgcgtagaaggggactgcagggccatcagattcagctgcatgtgaggaggaataatcagtcattgaacatgtaaacaactttgcagaaaatcaacccctccatcctttccctgtcgcagctttctgtggccttttctgaccccgatctgtgtataaacagagctttcccagtttgtcatcatcatgcatatgcaatttaggccccacctttcatccacattatttccctgacattttgctgtgaacaytggactcctcgtgtttattattttaaatcagcgctttatagtcagcgagtttttctagagaggaaacggaagcccagggctgggccaggggtgggtaactgggtagttttatatgcacatgcaggcacacacacacacacacacatgcacacacacacacacatgcacacacacacacacaygcacacacacacacacatgcgtgctcactcctgggcttggtctgcccagccttctgggtaaaccctccgtcagatggaatggctgggatgccagggttattggcattctgcagtttcttcataaacaaacagcaaatcccacgagggtggtctaatgctgggtaaatattccaacaccaccctctgcccctggctgcccccccaccaaattacacattctttttgttttttctttttttctttttcttcttcctttttttttttttcaaatagagacagagtttcaccatgttgcccaggctgggcctgaactcctgagctcaggcggttcacccacctcggcctcctaaagtgctggattacaggtgtgagccaccatgcccagccatcaccaaattacacgttcttgataatagattccacgggtatgtgctatcaccaacacggagactcagagacacattgtgcgtaggtcgaggcccatgagcagggacagtgaggaggtggctgtgtttactgagctcttgctctgttacagtttagtgccttctggcaagaggcaaatattatttccattttacagatcaggaaactgaaatgggtgacaactgaaatgacttgtccagggccacatgcctagtaagaggcagagcaggattggagcccaggtcagtaggattttggagttccttctcactggagtcataaaagaacccattaggcggtgaccagtagctcatgcctggaatcccagcactttgggaggctgaggcaggaatatcacttgaggccaggagttcaagaccagcctgggcaacataatgagaccccatcttcatacacacacacacacacacgtacacaaccaccaaaaaaaattcagctgggcttggtggtgtgtgtgtgtgtgttttttttttttttttttttgagtctgtctcccaggctggagtgcaatgatgctatcttggctcactgcagcctccgcttcccaggttcaagcaattctcctgcctcagcctcccaagtagctgggatttcaggcacccaccaccatgcctggctaattttttttgtatttttagtagagacaggttttcaccacagtaaccaggctggtctcgaactcctgacctcaggtgatccacctgcctcggcctaccaaagtgctgggattacaggcatgaaccacagcgcccaggctgatggtgtgtgtcttgtacaggaggctggggagggggatggcttgagcccaggagtttgaagttacagtgagctctgatcataccaccccactgcagcctggggaacagtgagaccccatctcaaaaaaaaaaaaaaaaaaaaaaagaacccttatatcttccctcggagcctgttgagatagttccaacggggttagggttttggtttctcaacccacaagcgttagaaggtgcaatttgggggatgaggaggtgtttttgggggcatcttcaaggaacagagatgtctggggtgttgagtgttgcaaccaacagccctcatatgcaccttctctggctgtaggagrcgttgttacattataggacagcatagtaactgatgtgcataatggtgaccaactcatcaagaaaatattaaggccaggcgcggtggctcacacctgtaatcccggcactttggaaggccgaggtgggtggatcaygaggtcaggagatcgagaccatcctggccaacatggtgaaaccctatctctattaaaatacaaaaaatcagccgggcgtggtgatgcacgcctgtagtcccagctactggggaggctgaggcaggagaattgcttgaacttgggaggcagagagtgcagtgagctgagattgtgcctggtgacagagggagactctgtctcacaaaaaaaaaaaaaaagaaaagaaaagaaaggaaatattaaattgcatttagcataaagtgtagtgtagtatctaaaaacattttcctcgggaatggataacacaagtttgaacaaataaggattatatttggaaattcagtaatgtgggatggctcattactcagtgttactgagtatatgtccatttattcaccatgtgttttagttatccactgctgtgtaacaaacagccccaaaatttggaggcttaaaagagtaacagtttaaacctgggcaacatggcaaaactcttgtctctacaaatggtacaaaaatcagccaggcatggtagcatgtgccagtagtcccagctactcagaaggctgaggtgggaggattatgagccccggatgctgcratgagccatgatcgtgacactgcactccagcctgggtgacagagcaagaccggtctcaaaaaagaataaaaaaagaatgacagtttattgtttctcatgatcctgtgggttgactgttcagctgggtggtttttgtgcttcacgtggcatgggctggggtcactcatttgtccacctgcgctgtttcattcacctgcagcattcagttgccagctatgctggcaagttctaagaagcctttactcatgtctggagcctcagagctcctcctcctgacctctccatgtggctamcttgggcttcctcacagcatggtggtctcagagagaaggtggaagctatcacagtttttaaaggttaggctcatcactatcggctacaagaagtccaggctaactcagatgcaagaggaaattgattctatcttttgatgtttgagtagcgtgtgtaagggagggaatgaattgatagcagctgtcttctgaggctgtctgagaaaccaggaggcacatgggggatgctggggagacggaactaattaaagccatgagattgggtagggtccaaaatactctgtgaccacagaatgcttcaaaagttagaaatgtggcccagagcccagtgtttttaactccattaaggtattgattctctgtaggatccaatacatcatttctaagatttttagaaagtttcagaaactgcattgtacagagagaaatggtggctcagaattcatctgtatagactttgccttgccttatttgggtgagaagtcattctcttaccttctcaagcatgcaacggcccctgtgtccaggacactgccctaggtgacaggatgtgtggcttaatcatggaccccagcaccattcctgcccctttctctcctcagcttaggttggcagcttggctctgatgtttgtattcctttcccaggaggtagagatttgcakgtgcacaagcttcagaaacaccagataggattgggtttgcatttagggggatcatcttggtggacctgaatgaagtcgacatggtgcaggaggctggtgagggagtccaggcgtggcaccatgagggccacccaccaggacggacgtaggggatggagaagatgagtttggtttgagttgcccgtgggacatccaagtggaacttkcagattattcagtggaaagttattgaacaccttctgtataccagaccttgtactcaagatctggagaagaaaggtctagagttgcagatttgagaatcatcggcatttaagtggcacctaaaactgtagggaggctgaggggttgcctggggagagtgtgtagaatcaaaaaggaagggggcttagaatccaacacgtggagcagccaatgtgtgtcgggggggccctcagcatgggacatctgtaaccygcccctgcttcctgccgggacccatgattgtcccaggtagcctgtgctgggtagatcggccattaggaagcaggaagcagtgtctgtctgatggtgttttgcacgattgatgctcttgcattggggagacttaagcctagccaaggtggggccatggtgccagttgagggactgcttcccacagttctaactggcaaacaagggcacgggagtgtgactgtgttacctggttgggggaggggtgggtaattatatagaggcgctttaaactacaaagcactgtgcagatgctagttatttctttattacatttaatcttggcagaccatctctgatctttgaactatgaatgaatcagaccaagtttcttcattatccttttttcatctcttttctgcgtaatcaactagctctttttcytcattgtgaaaggattattgttaagaatrtttcaaattataaaatgctgaataatattgcagaatattgtactattccttttctgtagggcatttgtctacttttttttctttctttttttttgagacggagtttcgctcttgttgcccaggccagagtgcaatggtgcaatctcagctcactgcaacctctgccttccaggttcaagtgattctcctgcctcagccttcccgagtagctggggttacaggcatgcgccaccatgcccagctaatttttgcatttttagtagagatggggtttctccatattggccaggctggtcttgaattcctgacctcaggtgatctgcccaccttggccttccaaagtgctgggattacaggcgtgagccatcacgcttggctcatttgtctactcttaatttttgtatttttatttttattttttcttgagagagagtctcgttctgttgcccaggctggagtgcagtggaacaatatcagctcactgcatcccctgcctcctaggctcaagtgattctcctgccttagcctcccaagtagctgggattacaggagctcaccaccacacccggctaatttttgtatttttgtagagatggggtttcgccatgttggccaggctggtctccaactcctgaactcaagtgatctgcccacctcggcctcccaaagtgctgggattacagacgtgagctactgcgcccagtcttgtctattcttaatttattgattttatttatgtgtcacttgcattttatttacttgctgtcgtttcagcaggcccatcccctctctcctttcccctccttgccattttctgtctgatgactcttccttcttctgagcaggttttcagtcctttcttctaggaaattcctctttgtggttcctaaggaattcactttgattagaaatgaaactgtttctttccttttccccttcctctcctccacaacactttccttcttgtagacaggaaagtaaatgacttgtttcagaagaaatctacccctctcttgagctccattcaaaaccccaacataagcgactggacttgaactttcgcaagatttccatgtctggggtttgttgttcacatgtcacttcaggactgatctccaggaagtgtagtttggtgtcggctgagtcagatctggtagtggaagactgcgacagctgcctatccagctctcggtgggctcctggactgcccttgggggcagtttctcacccaaggggaccaggccctgaggaatttattcccatgagcctgattcctttcatttttatttttatttttttgagatggagttttgctcttgagtgcagtggtgcgatcctggctcactgtaacctccgcctcctgggtttaagtgattctcctgcctcagccttccgagtagctgggattacaggtgcgtgccaccacgcctggctaatttttgtatttttagtagaggtggggtttcaccatgatggccagggtggtctcaaactcctgayctcaagtgatccacctgcctctgcctcccaaactgctgagattataggcgtgagccaccacgtccagtcttgagcctgattcttataagacagattgctcaaggcctggtcaccaacctgcttatggtaggtggaccttcccaccttctctggagggcagcggggtgggagcagggggtggtaataccatgtgtgtcatttggtacatatttgctgccaattcctaagaaaccaaatcagtaatttcctgaaggggaatctgagcaaagcgcatggcatggtgccgagggttgttcatcctcccacgtggggcygggggccgaccccactgcccacaggcacattttctactgtggacaaccctgtcagctggagccagcccaaggagtggcacacagcctcacccttcagtgcctttttgctctactcctgcccatgcttacagtttacctttcattggtgcagcactgagtgctctggaacacacattcctcctgtagttgggcttgtagttgttaatatcatattgcccatctccagggacaaatttgggatattcactctttatttccatgaagagcccaatctagggtggttctttttattttttttttaaacrgtctcactctctcgcctaggctggagtgcagtggcatcatctcagctcactgaaacctccacctcctgggctgaagagattctcctgcttcagcctcccaagtagctgggattacaggcgtgcaccaccacgactggctagtttttgtagttttagtagagacggggtttcaccatgttggccaggctggtctcgatctcctgacctcaggtgatccgcccgcctcagcctcccaaagtgctgggattacaggtggcatttcctatcccttccattgtgtctcagacctgctggccttcacaattacggcgtagtgaagggaccttgtgagtcttggtcgaccctcaccccgggtggctttctgctttggactctgggtcaaagcactggcgtcacagtcattcgacttgaaccaccaggagctcccccacttaccarctgtgagatcyggggtaagttatttaacctctttgcctggtttctccttctgcaaaatgggtgtgataataatacctttttcactgggataggcggcaagcactagaaatggctgtttctctggctgtcactgtcattgtgatgattattggctctgataaggaattgtagaaaagcctrgcccaaccacaagggagggaagagcagccccaggcttcttccaggatgtctcaagggcgcctggtggcttcaagccctgcccttgcctccctggttggggcggacctgacatccctccccgcttggccctatccaccctatcattgtttcccaacccctgactggggtgtcggaccctcagcccctgtttaataaatasccatattcaactttcctagacaatttttgtcttaaaaaatgtaaaaacggctgggcacagtggctcacgcctgtaatcccagcactttgggaggccgaggcgggcggatcatgaggtcaggggatcaagaccatactggctaacatggtgaaaccccgtctctattaaaaatacaaaaaaatcagccgggtgtggtggtgggtgcctgtagtcccagctactcgggaggctgaggcaggggaatggtgtgaacccagggggcagagcttgtagtgagctgagattgtgccactgcactccagcctgggagacagarcaagactctgcctcaaaaaaaaaaaaaaatgcaaaaacacactttcaattattcaccatttccccacagtaactaagaaagaccaaactgtaccttcccatctctctatagtgatcatggctttgcttgctggacagggctttggttaataactctaataatcagggaaaaagcaaaaacaacacaatagaggaatggcrcataggaggcaaaatagaagaaactgaccagtcrcattggctcacatctgtaatcctaacactttgggaggctgaggcaggcagatcacctgaggtcaggagttcaagaccagcctggtcaacatggtgcaaccctgtctctactaaaaatacaaaattagctggacgtggtggtgcatgcctgtaatcccagctactagggaggctgaggcaggagaatygcttgaacccaggaggcagaggttgcaatgagccgagattgtgccactgcattccagcctgggcgacagagatgctgtcttaaaaaaagagagaagaaacttacaagctgggtcaccgttttttttggttgccttctaaatgtcggagagaatatgctttccacatgaagttctccacagagacaaagaatcatgtacttttttcttttcttttctttttttttgagatggaatttcactctgtcgctcaggctggagtgcaggggcacgatctcggctcactgcagcctctgcctcccgggttcaagtgattctcctgcctcagtagtatggactacaggcatgtgccaccacacctggcaaatttttgtatttttagtagagatggggtttcgccatgttggtcaggctggcctcaaactcctgatctcaagttctctgcccatttgggccttccaaagtgttgggattacaggcgtgagccaccacacccggctagaatagtggaatagtgtacttttgatccaaatttctctctgcctcttttctttctctctctttctttctctctctctctctttttctttctttctttctctctctctctgtctccttccttccttcctttttgcattttggcaatggcctttcacttaatgtcttttctctttatgctccgtctttgggaggaatgcgtgaagagttggttgtgggtgggagacatggtgaagaaggctgctggcatggctgtagtggaggaagccaggtatgtcctttcattaggtcagatcatgtgagctgcatggagctcggttcctttcatatggagaacctggggttaggatgtccctgtggccctagatggcctcactttgttcccctgagctttagaatcttcrtcctcggcagggttagtgacgcacaacacctgaggcttcgagttgcatttagggaagaaagggatcatggcgctccctgttcagctggcgagccgtgcyggagccctgccatggtgcccccgcaccctcctacccctgctcccattcctccccgcccctcacccacttcccttcacgatggcctaatgggtctgatgactctctgaggactagttacaaataacatttgcatggatcattgaagcgcwttttatctcattatgtcacttagtcctcacacccactctgtgaggtggatattcttgtcactggcattttatagaaaagaaagtggaggaggaacagagggtgaagaaggcgcccaggctccccccgggaagcgcagacccggctggtctcagggccaagacttccagatccaaatgcaagtcagaagtcgtcttctctgaggagatcgagacagacggttgtggaagtggttacatgactgtgtgtcagaacatagaactgtacaccaaaaaagggaattgtactgtacatgaaaaaggggaataacaacaaaagatagatggtggagagcacagacggtcaaaagatggcttcagcatacagttgacccttgaaccacacaggcgttaggggtgctgccccccacacagtcaacatccatgtataactttttttttttttttttttggagatagagtctctctctgtgtcacccaggctagagtgcagtggcgcgatcttggctcactgcaatcttcgcctcccgggttcaagtgattctcctgcctcagcctcctgagtggctgggactataggcgcccgccaccacaccaagctaatttttatggtgtgatcacggctcactgcagcctcaacctcttrggctcaagtgatcctcctgcctcagtctcccaagtacctgggaccacaaatatgtgccacaacactcggctaattttttgtgtttttagtagagacggggtttcaccatgctggccaggctggtctcgaactcctgccctcaggtgatccacccaccgcggcctcccaaagtgctgggattacaggcacgagccactgcgcctggccaggaaaatatattgactattcattaagtggargtggatcatcaaaaggtcttcatctgcatcttcacgttgagtagctgaggaggaggagaaagagaaggggttggttttgctgtctcaggggttgccgaggtgaaagaaaatctgcaagtggacctgtgcggttcaaaccctgttgttcaagggccaactatggtgtggtaagagctatggtaccttaacagacactccacggggctgggagagaagttgacttggatggggcaccatggcacatgttgggatgatggcagtctttcgtatcttgcttggagaagtagtcacacagctgtacatatttgtccatattcatcaaaatatacacctaaggctgggcaaggtggctcacgtctataatctcaacactttgggaggccaaagtgggaggatcgcttgagcccaggaattcgagactagactgggcaaaatagtgagacctcatctttacacagaattaaaaaattagccaggcgtggtggcacacacttgtggtcccagacactagggagactgaggcaggaggatcgcttgagcccaggaggttgaggctgcagtgagccatgatcacaacactgcactccaacctgggtaacagagtgagaccctgtctcaaaaaaaaaaaaaaaaaccaaatacacacacacacacacacacacacacacacacacacacacagagttaaaatgtgtgccatctactaaaattcagtaggttttataaaaagtcagtaaaatacaggaatcacaaaaattgtgcatacatatatacatttatatgtattttaratagtttgttttaattgaaaacatttagctatacagtcatttgccaatcttttgttgaagggaaagttctttcctttttatataggtactctgtttggtattccttgtggcctttttctttttccttcttcttttttttttttttaaagatgaggtcttgctatgttgcccaggttgggcttgagctcctgggttcaagtgatcctcccaccttgacctcctgagtagctrggaccaccggtgttagccaccaccccctcctatggccttcttttgcagctgggatgtgttgtgtgtcatttccagtttccttaaagtggagtaagaattaaaagtcacttggaaggaacctgggtacagaatccccctacatttttattactgttctttctttttggccaaattkttactgtcttgcctaccttgaattcaacarcaatttcttytagctacttatatttgtcaaaaatgttcaaaatactcactttactttttttagaaacaacgcgctttctttcacatccatattttatctgtgtaggttatatttaattaagttatgtaaatataataccaaaaacaactggcataaacaggtttgggactaaacataagtgattcttggaaaatactccgaaagttggagcagaaataaatgcatggccttcctagagaggagcttgcctgcggcacgtgtaacgtcagttgatttctggagggactggactatcttggtggatccagtgtctcggctctggggactccagcgctatcctgtgcccctgccccttcctgctcggctctgacctgctccctcctcgctgcttccattcctggttctttcattttccttttttttgagacggagtctcactgttgtcgcccaggctggagtgcaatggcatgatctcggctcactgcaacctctgcctcctgagttcaagcgattctcctgcctcagcctctcaagtagctgggattacaggtgcccactaccacgcccagctgatttttgtatttttagtagagatggggtttcaccatgttggccaggctggtcttgaactcctgacctcaggtgatccacccgtctcggcctccmaaactgctgggattacaggcatgagcyaccctttcctggttctaatttgtccacaggaagtaatgcatgtctacttcttgttttctacacagcagcccttccagtgtttgaattcagctatgttgctctccctggatctcctcttcagcctcgcccatctccctttttcaagaagtcctcaggcgacrtggtttccagaccttacatggtcctgggcactttctctagstgtagactaaagcgcattgctcaggactgccttctcctgtttgcccaggctgctcacagaaccttgtccatcctgcctagctgcgggacacaaacactgcaggtagaaattctgtagctatacatttaagattgggggtatggcccccccatttctggaaagtttatatgtcaggccttaatgatagagctattgtctacataaacatttacgtttttaaaaaattttttatttattttttttttttttgagacagagtctggctcttttgcccaggctggagtgcagtggcatgatctcagctcactgcaaccttcgcctcctgggtggtggcgcacacctgtaatcccagctactcaggaggctgagacaggagaattgcttgaacctgggaggcggaggttgcagtgagtcgagatttcgccactgcactccagcctgggtgacagagcaagactctgtctcaaaaagaaaaaaaaaaaggcaacttcatttcatatgattcaatctaacataaaagyaacaaatgtattcactgtggaaagcctggaaaatactatgtagtatgaaaaaatattacccataatattatttctgaaggataactgctrttaacattgagscttctcttaaacgaatatcagttttcttctatattatgaagsactattgtaagaaaataattcaacctagacaggagtacaaagaataaaagtgaaagtcctccttccttcccttgctccccttctcataggtacccattgccaaatgtttggtgtggatacttccagagatctttctgtgaattgcatatttatgtgactctatgcacatttaggacagatacattctttatataagcttatgcaaatcggggaagcaaagctctacacacccctctatggtaactgtagtttcctctcaaggggatgagatgcctctgccgtctgcagccctgcctccatcagctgggtggtgccactcgaggtccacactggtggcctccttgagccacagccacctctcgagctgaggaagagtcagggctggtctagcaagctgcttctgcttgcttccatctgcagcagcaagaaggcatctttcaagggcctactgggcaggaaatccagggacagttykgcctggcaggctggtggcagaggtggctggggtgacagcagcattccagccgagagtgaggtcccgctcttagacaaacatgggctttggtcgcaagagaatggtttatttattgggattgaagaaggcatcaaaatcaatacagtcatcacctcacagggcagaagagcggatggtggtttggggagaaggaggcggtgtgccaggaggagggaagcgtggcccagagttggatgcctggggccctgggcagcgcagctgacctccctgggcctctgtgggtcagctgcctagggagttgcctaggcagttggcaactgcctagtggctctgcctagggagcagaggtagagacaggtgagctgggaaaaggtgggaggggtagggggacattggaagccagtgacaccgggattcagggtgacaaggggcatgaggggacagtggagtgtttggaggctattgagtgygtggttgtgtggtgagaacagggagaatggtggtggagctggagggagggcaggtcacctgccgtggtcgtgcttggcgtccgcgctggagttctctggcggtgaaagggtttccagtgtgaactggagctatccccaggctgcagacctcccactgctgagctgctgttggttgcgtggtaaattttgcttttgttctcccagtcttaggaattctgtttgcttccccgaacctcccaggcttccccaggcaagggttgtctccccagagacctggagccgggagctgtgcggtttcctgggacctgtggcttctgctcctttgctttgtggaaaggaagtcagaggcggaaatgggagggctcctttccagtgctgcagggctccattgagaggctgatttgagagtgaagatcttcggaggatatttcctctggctgagtgtaattgacttaatctgtggtgtggctcatttttccttttggaaaaaggagagatggcgcctgactcaccccttcatgaagcactgtgtgaagtacacgaagcccctctccccgaggacagccctgcataggtgcattcccacacagtcagtgtcccgactcccatcccgcagacagtaggtccactcccttcctttcttctcggtgcgagggtggggctcaccccacggtgatggaaaggmggtcctcgagcctccccgggggcctctgtggcgcacgaactgkgagagtggagagaaaagcccctcaggaggaggagtactgagctgggccgtgaagggcacgttggatttcgatcctgaggtcagtaggggaggggcagtggcagtggcttgtgaacaaaggtctgggggtgaacatagacggggtagtggagaacctctgactggagagttgggtgcagtagtaacaaagaagcctggaaggttatttgggatctgaaatggggaggagtaaaagccatatgagacagttctgactccattttgtagacagtggrcagccattgaaagctttggagcaggcagttgacctgagccctgctacctttcaggaagatgattctggcagcgaacggtgatggctgtgagcagcagagtatgtgagaacctgcctgwacgtggcgggatacaaggasctgacctgagccaccgaagcgggtataggagagagagggattcgttcagccagcatagacggagggcctgctggtgctcagcatattagaaggtgcaaaatggaaaagtctgggttgttgtccttgctgaacttcccgtgtgagtgtgaagatttcaacacactccccataaactgatgagagactatttcaaatcacccatgagaaggtggaggaagagaacagccagccacatgtgacatcgtgatggtagagttgggaggaacactgaccaagcacctgtttcgcgccgggcactgtgtcaggtgctctgatcctctccccaaccctggggagatttcagagagagactgaggtgctttctcagggacacacaggcccttggcaggtgaggctggtgttcagcttctgctctgtccagtttcagagtcttggctctttatgccaagggcagggggctttgaaccaggccttgaagttagtggtagcaatggaggtgggggtacattctataagragtcccagaaagagagagggagagagacaaagagagagagaagagggaggaggaggaggaggagaagggggaggaggagaaaaaggagaaggggaaggaggaggagggtrtggctgaattagagaccaggaatggcagttagggaaagatggggtacaggtatggtaggcaagagggatatggttgaaagagggtgggtggctggtctctttcttcctctgatctaccatgatgtcatcttgcgaaaagatgatgagacttctgcttccagtcgagagtgagcaggacagcctggaattattctcccactgtaaacaactaggagctggataaaatatagggaccaggcaatggtggactgtgattccttggaaaaagaagactaaccgagtgagccctatcgttcattacctagcctttctacctgaagagaattctaccacagggagggagaacccaaacggagactggcgagattactaagttgagggaacagagatcagaatttggagacaccaagttctaaggtttctagaatctgtgggacagaatcctaaaaggaagaagctggaaagagaaagatctccagaaatctcgatagaggcctcctggaatctcggtgaatatcaatctgctcatgcacagggcaaccctgtgagaccagaagagaacaactgcagagggagctgtaagacaaacaggatagagccaacacaggaccagggttcactggagtcctctttaaaagaatatgacaaaattatgcattgaaaaatggtaacgtttgcagtgtgagacatccagcaaaaaattactagacaaagaaggaaatgtgactgacccactaacaaaaaaaaagtggtcaatagaaatagacctagcaatgacaaagatgtgatggaattatcagggaaaggacatgaaaataacttttttttttttgtaacagaatctcactttgttacccaggctggagtgcagtggcacgatctcggctcactgcaacctttgcctcccaggttcaagcgattctcctgcctcagcctccggagtagctgggattacaggtgcatgccaccatgcctggctaatttttgtattttttagtagagatggggtttcgccatgttgaccaggctggtctcaaactcccgacttcatgatctgcccatctcggcctcccaaagtgctgggattacaggcttgagccactgtgcacagcccgaatataacttttataaatatgtttcatttgatcaagcatgtaaatgaacacatcaggatgatgggaagagaaatggaaagtataagaagatccagtagcacctctagggatgaaaaatcaaaatatcaactacaaaatcaaaaatgaaaagctaggtagataggattaatagtagattagacagtgcagaagaaatgatcagtgaattgaagctagagcaataaaactatctaaaattaagcacataaagataaaatattccaccctgggcaatatggtgaaaccctgtctctacaaaaaatacaaaaattagccaggagtggtggcatgtgcctgtggtcccagctactcaggaggctgagacgggaggatcacatgagctcaacggcataggttgtgttgagccaagattccatcactgcactctagcttgggtgacagagtgagaccctgtctcaaaagaaaaaaaaaaagaagaagaaagaaagaaaaaacattgacaaaaggtaatactcagagcatcactggcatgtgggacaatataacagaccctaatatgtttaattgaagtctcaaaagaacagagagaaagacagaaaaaaatatttgaagaaataatggtgggaaaacgtccaaatttgatgaaaactcaacccatgactcaagaagctcaacagaatacaaacaaatataaggaataagaatgaagagaattggtcaggcgtggtggctcatgcctgtaatctcagcactttgggaggctgaggtgggcggatcacaatgtcaagagatcgagaccatcgacaaacatggtcaaaccccgtctctcctaaaaatacaaaaattagctgggcgtggtggtgtgtgcccgtagtcccagttactcaggaggctgaagcaggagaatcgcttgaacccatgaggaggaggttgcagtgagccgagattgcrccactgcactccagcctggcgacagagcaagactccatctcaaaaaaaagaaaaagaaaaatgaagataattacatcaaggcacattgtaatcagattgcttaataaagatacactcataaaagtaaccagaaagaaaacaaaaaggaaaaaaaagacacacgacatagagaggaacaaagataagaatgacagcagatgtgtggtcagaaattattcaaggcagaagacagtagaactgaaaaagaaagtaggtcaatctagaattctatacccaacacaaatatccttcaaaaatgaaggtgaaataaacactttttgatggacaaactgaagttgagagaattcgtaaccagcagacctgtagtacaaaaaatgttgaggcaagttttttaggcagaagaaaaatgatactagatagaaatttgggctgcacaaaggagtgaagaggcttccaaatggtaaattatatggaaacatatgaaagttatcttttctcatttttaatctctttgagaaactgcttaaagcaaaaatataaacaaggtactttggagtttagaacatacatagaagcaaaatgtatgacaaaaatagcacaaaggacaggaggggagaaatgaaagtatattgttataattttcttatttatctttatttattgttactagtttttagagacagtgtctcactctgttgcccaggctcgacagcagtggcacaattatagctcactgtagcctcaacctcctgggctcaaggtcttctcctgcctcagcctcccaagtagctgggactacaggcatataacagcatgtctggctaactttttgtagaaatagagtctcaccacgttgcccaggctggtcttgaactcctggcctcaagcagttctcccaccatggcctcgcagagggctgggattacaatgtgagccaccacacttggctgtaattttcttatatgcaaagtaatagaatatttgaactagactgtactaagttaatgtttactctaagtcccagagtaatcactgaaaaagcgtaacaaagagatatgactcataagccaataatggagataaaatagaatggtaaacaaaaatcattcaaaagatggcaaagaaagtgggaaaaaggaacaaagamcagtaagataagtagaagacaaaaaacaagacaacagttttaaatatagccatattgataatattaaatgtaagtgatataaatattcartttaataggcagatattggcagtggctcacgcttgtaatcccagcactttgggaggctgaggaggacagattgagctcaagagttcaagaccagcctgggcaacatggtgaaaacctatctctacaaaaaatactaaagttagccaggagtagtggtgtgtgcctgtagtcccagctgtttgtgaggctgagatgggaggatcatttgagcgagcctgagaggtcgaagctgcagtgagctgtgatggtgtcactcactccagcctgggcgacagagtgagaccttgtcttgaaaaaagaaaaaaaaaaaagacaggtattgtgcartggataacaaagcaagaaccaactatcaactatcataaagaaactcatcttaaatataaagacacagatagactgggtgtggcagctcatgccttcaatcccagtgctttgtgatgcccaggtgcaaggattgcttgaggccgggagatcaagaccagcctgggtgacagagcaagaccctgtctgtacacaaaaaagagaccctgtctctacaaaaagaaattttctcgctctgctgcccaggctggagtgcagcagcgtgatctcggctcactgcaacccttgcctcctgggttcaagtgattctcctccctcagcctcccaagtagctgggactacaggcatgagccaccacatctgtcctctacaaaaaatttttttaaaaattagctgggggtgatggtatgcgctggtagtcttagctaccttggaggctgaggcaagaggatggcttgagtccaggagtctgaggctgcagtgagctgtgattgcacaactgcactgcagcttgcatgacagagcaaggcccagtctcaaaaaaaaaaaaaaaaaaaagacacatagattaaaagtaaaaggatagaaaaagacattttgtgcaaaccctaattaaaagaaaaataggccaggtgtggtggctcacacttgtgatcccagcactttgggaggccaaggtgggcggatcacttgaggccgggagttcgagaccagcctggccaacatggcaaaaccccatctctaccaaaataaataaataaataaataaagatggtgtggctataagtaccagacaatatatactttggaacaagaaatattatcagggatagcgagggacatttcataatgacagaggaatcaattcatcaaaagacatcataattctaaatatgtatgcacctaatgacaaagctgtaccaaaggaatatttatagaaccctgcacccaagaactagagaacatacattcttttcaagtgcactgaaatgttctcaaagacacacaacctgttacaaaacaagastcaatacactttggctgggagtggtggctcacgcctataatcccagcactttgggaggccgaggcgggtggatcacgaggtcaggagatcgagaccatcctggctaacacagtgaaaccctgtctctactaaaatacaaaaaattagccgggcccacttggtggcaagcgcctgtaatcccagctactygggaggctgaggcaggagaatggcgtgaacccaggaggcagagcttgcagtgagccgagatcgcgccactgcactccagcctgggtgacagagccagactccatctcaaaaaaaaaaaaagactcaatacactttaaaagattgaactcatataaagtatattctctgacaaaaatggatggaagtagaagtaacagactatatctttaaaaatcccaaaatatttggaaacacatgcctaaaggaaggaaaaaaatcacaagagatcttagaaaacatattgaattaaatgaaaatgaaaacaacatgctgaaattagcagacgcagacaaagcagtgctttgaggataatttgtagcattaaatgcttatacagtagttcccccttattcgtgggggctgttccaggatccccagtggatgcctaaaactgtcagtagttctgaaccctatatataccatatttttcctatatatacgtatctatgataaagtttaacttataaattaggcacagtaagagatgaacaacaactgataataaaatagaacagttataacagttggtacacattttctgtttgtgtcttccacccacaaacttaatacctttttcatctttaagccctttactatgcactgtagctgttacttttgcagtctgaagtgcaacagcaaaactcacacaaatttatctttcccttttcacaagttcacatatagaagatttgctcttaccctagatcttcgccacctcaacgtatgatctttcctttggttgagaaattttttcttttcacttaaaggaaacgctttatggcttctctttggcatatctgaattgctagcatcactacttttatactttggtgccattataaagtaaaataagggctacttgaacagaagcactgcagtaccttgtcagtcaatctcataaccgagacagctaccaagtgactcacaggtgggtagcatggatagtggggatatgttggacaaagggctgactcacatctctagtgggacagagcaaaattgtactagagttcatcacactactcaatttaaaacttatgaattatttatttcttaaatttttcatttaatatttttggactgtgattgaccttgggtagctgaaaatgcaaaaagtgaagccacagataagggrgactactgtattaataaagaagaaaggtctaggccgggcgcagtggctcatgcctgtaatcccagcactttgggaggccraggcaggtgcatccttgaggtcaggagttcgagaccagcctggccaacatggcgaaaccccatctctactaaaatatgaaaaaattgctgggtgtggtggcatgcctgtaatcccacttacttgggaggctgaggcatgagaattgcttgaacctgggaggtggaggttgcagtgagccgagatcrtgccactgcgctccagcctggaggacagagcagactctatctcaaaaaaaaaagaagaaaggtctaaagtctgtgatggaagcttctaccttagaagcttaaacctttagattgaagtagaaaaactagatccagagaaagaagcagaaaaaaaaattagtgggaaaacattacaaatcagtgactccaaagctggttatttgaaaaggtcagtaaaatagataatcctctagctagatgattgggaaaatgagggaggacacaaatgaccagtaccgggatgcaggtgagcatgaatacagatcatacagacactcagagagtcataagatgatgtcataaacaactctgtgccaatacattgaacgacttagacaaattggacaaattacttgagaggcacaaactatcaatgttgaatagccccatatccattgtagaaattgaattttggtttaaaaccttccacaaaggaaaccccagcctcagatggtttcagtgctgaatttcatcagacatttaaaaatgaaataataccaattccacataaattttatcagaaagtagaagaggagggaacatttcccaacttattttatgaattcaatattgccctgatatcaaaaccagacaaagacgttacaaaacaaaaactccagatgaatatccctcatgcacatgtaagcaaaaatctttaacagaatattagcaaagaaaacctggaaatatataaaaagaataatatataatgaccaagtagggatttgcacaggaatgcagggtggttttaacatcttaaaattggtgcagtttaacattagcctactgaaaaggaaaacccataagatcatctcaattttgtcaaatgcagaaaaaagcatttgacaaaattcagcatccattcagataatacctctyagcaaactaggaaaagaagataatttcttcaacctgagaaaaggcatctttgcaaaacctacatcatatttaatagagaaagtctgaatgttctctttttaaccaaggttggctttatgagcacatgacttgtgcagtctggaaattcttaacaattttatttattcatttatttatttgagacggagtttcgctcttgctgcccaggctggagtgcaatggcgcgaccttggctcactgcaacctccgcctcccgggttcaagcgattctcctgcctcagcctcccaagtagctgggattacaggcatgtgccatcacgcctggccaattttgtatttttattagagatgggatttcaccacgttggccaggctggtctcaaactcctgacctcaagtggcccactcgcctcagcctcccaaagtgctgggcaggattacaggcgtgagccactgtgcccagccaacagttttatttttgaacttatgttttgcagctgaagcctgctgagacaatggaacatgcatatgtactgaagaaatacatacaagatgagtacctgccatatgtttttgtgtcatttgcatatttgtgtgtgatgccccggcaacatggagttctggtgaattcacaatgtctgggagttgagcaagatgcaaaacaagcgcaaaataacatgtcgcatccacagctgagtaagtagaggtactgacagctctgagattttgtgctttctgttcaaactagaacttgcttcaaatacagaaagaaggcagtgacattctcagaaacatgaacatcccatgctgcttccctgtattggccaaccatttaatgctgaaattaatgacacagaaataaaagggaaggtaggacacaccctaatagctttcattccttcctcacgcattataagctgaagatagtgttagcagaaggtgcgtgtatcaataaatgaaataaaaacagttgagttttctgcagcctttccactgtttttgtttttgagacagagtctcgctctgtcgcccatgctagagtgcagtggtgtgacctcagctcactgcaacctctgcctcccgggttcaagcaattctcctgcctcagcctcccgagtagctgggactacaggcacatgccactatgcccrgctaatttttgtattttcagtagagacggggtctcaccatattggtcaggctgrtctcaaactcttcacctcaggtgatctacccaccttgacctcccaaagtactgggattacaggcctgagccaccacaccaggccctttccaccattttggtaaaataaaatacatatatacatatgagccaagaaatactaattgccatgtgaggcaattttccatgtgagaaggttgcagagggaggttttaagggactttctaaggagtgatagaacacaagccagtttggctccaaagacagtgcttattccacggcatcacactccctcctgttgtaggggctggaggaggacttgttgactaatggtgtgaaggttaattggtgtccccagacacaggcagccactgtgggctgggaggtagtcggtcagttcagcaccggcaggtggctctagcagctgctggcactgccatgagggtcttcccgataatgagacgtggaaagggatgggacaggagctgagccgtccagctgggtggcagggtcctggggccaggatgtgcagctacactgcagggcccaaaacccagccagtgcacagtgacacaggcagcattccacctcagaggctggacaggcaatgggggaggaccaggggatgggaacttacttgagagctgttgtggtttgaatgtttttgatgttccgaatgtgtttgaatgtttgtgatgaaatttgagttttgttgaatctgtggatacagaggacctacygtgtacaaggcagtgtttgaggatggagccttagaatgtcagcacagccaaatttggggaccattgacacacattgccttcccaggtgatgaaaatgaccttgactcactcaagcagactcagaaagctggagaattgggaataaattcaggagtaaccttgggaatttataatatgcctaacaataataggtaacacttagatgtattgtgtatctggcacagtctgatgctgggctctttacacacatcatagaggagtctccaacccaccctgagatgggcctgtggttatttgcatttcgcaggggaggcagcgagtttaaagtgtggcaacttccaaggcccaggcccatgatggagatgaaattccactccagcctgagtttggagctgcattcttcaccgccatgctttcctgccccgagtgttggcctcaccgagaggaggtgtgtgtgtcgggggggagtgggctgggacacgtggtcatgggggcccacagagccagatgccgggggaaccaggcaccctcaggagccatcacggctatcgctgcatgatgccggtgaacccctcgggacttggcctggttttcgacctcttggcagccccgagtgttcccaggctgtgaaaatccccccaggtgcagtggctggcctggtctccgagggaaaggagccgtggagctcgcaggtggaaggctagagagagtaagtgatacggttaggctttgcgtccccacccaaatctcatcttgaattgtaatctccatcatccctacgtgtcaagggagagaccaggtggaggtagttgaatcatggggtggtttcccccatgctgttctcgtgatagtgagtgagttctcacaagatccgatggtattataaagggctcttcccctttcgctcggcacgtcttcctgctgctttgtgaaggaggtgttttgtgaccctttcgccatgattgtaaatttcctgaggccttcccagccatgctgaactgtgagtcagttaaacctctttcctttataaattgcccggtcacaggcagttatttatagcagtacaaaaacggactaatacaggaagaaagctggggctgctagggagaagttaagaccaagagtgagccacggggtgtcacttgtgggggactgtcragttggtgatttgcacccctttgtgccagccaggcccagcatctgcctagcagagccccagggaccggcttgccttgtgcagcagctaacctcacccactcagggcacatggcagcctccttgccagctgggcttcccccttcccctccccagggcaggctcatccgagtgagtgagagcagtgagtccgtgggcatcgcccggaaccagctccagtttctaaggagagtagagcttttgcgctgctgggagctggatgatgagtggcgagaactggcctggcagcgcagctcacacccatctcggggcgggggtcttctcccttcattcctggttgtcatgaccctgagcttcagagtttctgtgtcaaggcgaagcaggagggcagagtgaggtgactgggttctgtgcccaggtcttgtgggaagatcttagggaggtttatcttcccacctggccctttgcaaggtccgggtggaggtgaggcgtgtttgctaaacatgatgtagcgcaaggaggctcaggtgggctcgatggaggaggcggggttcagctagatttcgagggggaggcggaaggcggccaggtggggaggggcattctaagtgcgtgcttcccacattgggggtgcagggttgtgtttgctttggcgcatgtgaagccacaggatgaccgtggagttggcatttcctttcatcctgtgtcctccatgtattcattccttcacccagcagacagcgtgctgggtgctactgagtgctgggaacacagtggggactgggacagatgtcgtccctgccctagtggcacttacactgaaacaggtggagacatctgtttggcaaatatttttaaacacttaaaaatacaaatacaaacatggattttattgaacagaatgcagaatccacatatattagcaagtaaaatgagaagcttcctccccaggcactttcgtggggaagtttaagagctctcaaaataggggctacagcatgtgccgaggtcaggaggccagttggtgacatgctgaggacgtcagcttggctaaagcagatggtttacctcaggcagctgtgggggcggggtttagattcaagttcatggtaaagcccagagtatataggaccctgaatgccagaatgaagattttkaactcttggacaattggcagctattgaggtgttttgagcagaaggtggtacttgcaaaaatattattttggaagattaatgtgttccagggtggattggcaggaccagggagatgagtctgtccccagccctgtgggaagtaagggtgtgagccaggtggtggcagcaagagtgaggaaaaaggagacccagaggcttttacctggaaagaccagctgggatgaaggacctgctggaggcacagaaaggagctcagtgagagagagcaggctggcgctggttcaggcgttcagccaatgttactgaggacctgcgccgtgttgggtgctgtgttcctagctggggcgtagtgttggcagaagtgagacctgtggatcagggctggttaggggagaccatgacaascttgggtgttcacattgactttagcgttttccactcctggtcccgccrtaaggtctcctggaaacttttcagcaataccagtgtctgggcctctggttccacttttgtggactctgcctgggcataactccccaggtgattctaaggcacagccaaagttgggatctgctgagtgagggtgaagtgagcacctgcaggtggtgctcatcaagacagtggaggctgaggaactggaatttaggagaggtgatagttcaccagggccttgaacttgaattttggaatttggaagtctctgtcatgtgactaagagagtgcattgagaggcctggtccatgacctgccatggtccttccagaccagagtctctcaggacaagaagaaggaaaattggaaaggactttaaatctgaattgaaaaccagggaactgaattaaacgcaggagacatgaagcagcatcaacaggtggaaagcaccgccgtgggtggagctttgaatgtgtgggagacatgctggtcagaagggaaaaaagatggtaaaagggtacctaactcagggtgagggtgaaccagggatcagaagactgttagaaaatgagggctgggcgctgtggctcacacctgtaatcccagcactttgggaggccraggcgggsagatcacttgaggtcaggagttcaagaccagccaggccaacgtggcaaaaccctgtctctactaaaaatacaaaaattagccgggcgtggtggcgggcacctgtaaatcccagatactcgggaggctgaggcagaagaatcgcttgaacctgggaggcggaggttgcagtgagctgagattgcaccactgcacttcagcctgggtgacagagtgagactccgtctcaaaaaaaaaaaaaaaaaaaaaagattattagaaaataaagacaataaatgcatagaagaaaaataggggataggcataggaagatggcctaaggcagcagcatgagagtttggtttaaagacccaggaaggctggaagctctttgccttgttttyatatctactactccaccttgaacagtgattctgtagaagagaatcacctggaggagggcacagatgcagatgccggggattctgtgggctaggaccctggaatctcccattttaaccagctccctttgggacgctggtgcacctggcccagaaacactgaactggaaaaacagcaactcaggaacaacgccagaagggttgcatcagaaccagtgactggaaaaaaaaaatgctgaatgtccctgggaaggctgtgagaggctgtagggaagagggaattgctgagaaacccctagaaggactaaaggggagaaaaaagatgtatcaaatccccaggagaaagctgtgattcaggagagcagatgatgtgggtttttgttgcagacggtgtgcaaaaagttttactctcaaaatgtcattttctgaattgaaaggtaggaagttttggaatccaaagagtttgctgtgttccatggccacaaacacaagagaataagggcttggtgtttctgtgtcatcagtgatctgttcccttcaagtttttacattttaagtttgtgtgatgatctatctggattcctaaatatcttctgtctccagattatacacttgtcttcctccgagctggtacatttgctttcaagttcatctaaagttagtttcagaaagtcaggtgatctgtgtgataaatgtacccagtgttgcttataggtaagaaagcatgagcaaaagcatggagccctttcattcctgcctcacttagtattggccgtcagttagaaattggtttcaattttctttatcgtccagaatctatatgcttaaatatatgtgaaagctctgtgttttcagaacatgtgaaaactccaactgagtgtggccagcccaagctttccttcctcatgggggcctttgctgacttctcccctctccctcagaatcaagctgcacatcctctgttcactgctagcttctttttttattttttttgagacagagtctctctgtgtcgcccaggctggagggcagtggtgagatctcagctcactgcaacctccgactcccgggttcaagcgattcttctgcctcagcttcccaagtagctgggactacaggtgcccgccaccatgcccagctaatttttatatttttagtagagacggggtttcactatattggccaggctagtcttgaactcctgacctcgtgatctgcccgcctctgcctcccaaagtgttgggattacaggcttgagccaccgcgcctggccctttttttgagacagrgtctcactccatcatccaggctggagtgcagtggtgtgatctckgctcactgcaacctctgcctcccgggctcaagcagttcttgtgcctcagcctcccaaataacttgggactacaggcatgtgccaccatatacccagctaatttttgtatttttagtagagacggggtttcaccaagttgcccaggctggtctcgaactcctgacctcaggcgatccacccgcctcggcctcccaaagtgctggaattacaggcatgagccacggtgcccggccactgctagcttctttactgccagtagagtcagctccttgaggtaattttataatctccagggcccagtatggggtccgccactcaccagagtattcaatagagttgaactgaccactttgtaaaaagacatgagaccaaacatgattcggctttaaaacggacttctttaaatagaattggaattatttggcctagagaaagagaccaaggtgactaaataatgaggtcacatcaataagagaagacaggaaatgctgtgagcagatgtttgtgtgtctagtgaagcagcaagagcagtgggagcttttgaggagttttgtggttctcagtcatctggagtaacagatccttaggagaatctgacaagagcaatggacttgcttcccagagacgggccaagtgtgatttctgccctactttaagggctcaccaactcctccaaagcctagtccaagtgagtaatccctgggttaggataagatgctacatttgagctgtccattcttgcatggaaatggggaggttgaccagatggccttctctggttttgaccatctacacccctgaaacgtgggccttctgggtgggtgcattgatcaggctgttgtgtctttatgttcagtaagtatcaggagcattctcctcttagcccacaaactctacaattgacataaaaataaatctacttgttcacaccattgcttcagagttcattattctctggtagaaaaggtcaagaaaaagttcattgtgaacactcaggaatcaaaaaggaagaaggcgttgttccaggccagggtttcttgacgttggctccgttgacatttggggctggatggttctttgtggtgggggctgccctgtgcagtgtaggatgttcagcagcatccctggcctccgcccactagaggccagtagcacccgctctcctagtcgtgactgtcaaaacgtctccagacacactgtggaatggcctcggtggtgggctgatcacctgtggttgagaaccacttctctgtttatcttcattttggctctcttatcaagggggaacacttcagtggagaatgaactgttctttcagcttctttttaccactgtagctgttcacacagctcacgtttgctatgttccaatagctgtgcaaggccctggggctacaaatgtaagtgacacccatgatctcaggtacttactgcatcctcttgggagatacacacagacgcatcaggagctgcactgagggaaggctgtgcctcatgctgtaggggggtctcctttgcactgctagtgtcttctccacccagaatgcccatccttctggcctctcccgtggctggatcttgcttggcattcacttctcagttgaaatgacactgcttccgagagacctgtcctaacgtcggtgccagctgttttcacctaatgctgcataacagcccagaactcggtggctcatgccaggcattcctcacttgcacatctgtgggttggctggggtggggctgatctgggctgggctcggatggctttggctctaagctgcagcttgggatcagttctgctgtatcagtttattgttctgttgtaccagtgaggttcttagtgtgtggtgttctggtgacgggagaagcacaaaacaaaaagccagccctcatgggcatttcagaatgtgctgcttttatagatgctgaagtctttttggccaaagcaaatcacgtggtcaaagccagcaggaaggaaggagactttttttttttttttgaggtggagtctcactctattgcccaggctggagtgcagtggtgctatcttggctcactgcaacctccgcctcccgggttcaagcgattctcctgcctcagcctcccgaatagctgggattacaggtgcctgccacaacacccagctaatttttgtacttttagtagagatgagtttcgccacattggccaggctggtctcgaactcctgacctcaggtgatccacccgccttggcctcccaaagtgctgagattacaggcgtgagccaccatgcccagctggaaggagactttatactctgcaaggatgtggctgtgtgatgcttttgcgggggagtgaagaactagggccagctgtcttcctcagacctcatctaaagcagctacctagtcactttctaccacttttattctcttttgagctctgatatgcttacrtttgaaatattatttctgctaagagcttgacaagggtaaggtcacagactcgtcataacatgtggacctccacaggcagcagaggcaggctgttttggttggagccttggatccctgaaatagcacatcttatagggaggactggagagaggcccattgtgattggagggaggggagcctgttgaggagcaaccagagtcaagacagtagagcctggggccaaggccgccatgttccgtgtctggggaagccatcacgacagatctgtgtagtggcacccctggcagtgcgcaacctgagaagctgctctagctgcctggcagatcatgagggacctngcctaacatgtcagatgggctggatgcctattctggaagtcctctttgttttggaagagggtagactttgaacatctcttaccaaaggcatgcacaagttataagcagaaagcttctggaggcccctttgttttgaggcacatggtggaaacttggcagatacccagctcggaagggcatggcagcagcaccccaggcttgagcctcgtgttgtattgattaaggttgcatttattggagatctcagagtctctcttggtgcagcgatgcttagaatttgcccaaggcagcatgggagagtcactcactgtctgcagaccttatgactcctccttcccacctgcccagatgttccaggtcctaactggatccttagctcttggggagccccctgtgccgcggctgtagccccgccttggcagacacccatcacagttcagctaaggtgatcgtattgagggaggggagccctggccccggggtaagggggtctgggttccggtctcagcgctgctgggagactaggggctcggaagcttatttctctgactttaagtctcttgcaaaatgagaataagaaaactctgccctgcctcctcttgttgtgagaaacaaatagaatgatgaacatgaagattcttgtaaaacgtcctcaaagtgttattattagttactaatttgccttcaatggaagcaaagaaaaagtcatgaaaggggtattttgtgccaagccctgtgtgaggtatgtgcagtctttcagtcttttttttttttttttttttttttgagacagagtctcgctctgtcgcccaggctgcagtgcagtggcgcaatctcggctcactgcaagctccgcctcccgggttcatgccgttctcctgcctcagcctcctgcccaccacgcctggctaactttttgcatttttttttagtagagacgggatttcaccatgttagccaggatggtctcgatttcctgaccttgtgatctgcccacatcggcctcccaaagtgctgggattacaggcatgagccaccgcgcccggcccagtctttcagtcttactggaacagcctgtggggttactgcaagggtgaggagccatgtcagagaggcaggcgacttgctccagggcacacagcctgcgggcagccgtgtgcaggtctatgtgactgcgaggcctgacctcttcccgcccctccatctgccagttgttgcctatggctttctatgtgccagtcccgggtgctggggagccagcagggaaacaacccgtgtcccggctgcatggagtttgctttccaggcgacgaggcgaaggagtgaggacagagaagggcaagtgcagaacattctgtgctgggcctcaaagcaggactggagaatgagtaggggtgggcagggaaggcctctgaggggtagggacatttcatagggacttaaggagccactgcagcagcctctacaggcgtctgcagcgagagtggccccagaagtgggacccatctgtgctgagtggcggcctcacaggctctggctgggcctccttgggtgggagaaggctggttgcctttggaggggccacctcccctcctccttcctgccccatggctgctaggagactttttcctaaagcatctgagtaagttttaatgacgagtttcccgtgcggctggcctccagccgcagaacgtcataggtctctgtgggcgacacggacactgcaccctgagcagctttctcttgctcagcttcttctccacagttccagagtgttctggaaccttcaggctggaatgagcttataggaagagattggtttgggcaagagagccaccaaaccgcctccagtggggtgacttccactcgacagtcccacttagagcagccccatttccctacgggttgttagcaaacgtgaaggatcttgcgatgcgtaaacttccaggagggaggattttgtaaaggaatgttctcatggttgcgttctgagccgggatattagaaacactttatyaggctgtcatgggttagatgacactttagtccaagtgtttatccatttgggagatgcattttattattctaaaaatgttgtatattttaaaaaagcagaacaattcttttgaaataagttatttccaggaaaactttaggattaagaaacttgtaaaaagatctataaatagagaccccaggggctgtgsacctctgtcaccacagagcctgatcgtgctgtgcagtctaaaggggaccacggggcaagaagaggtgactttggtggtgtccagagcaggcttctcaacctcatgggtttggtgagtcaccccaggacccgggactgggcagtgcagtcagctcccaggtacakctgttgcccttgggcccagaagtaaggcttcgagcgccagctgtctcgccccaggccaaggagcctcttccctctctgtctggtggtcagatggtgcctgtgtgtgtgcagaacactttgagcgggagccctgggaataagttgctcttcatgattccagagagggaggagtctcctgtgtgccactcacccagtgtggtgtctgagctcgtcttcgtgtttcagagagacccccatctttctttaatgctcacgtcttcgtgaagccatcctcagcatcaccctgattggatgtgatctccccaactgttcacacctctcctcctgcctgttggtctgctctgtctgatgttctagatcactcccaaaatgtaccctgtccgctgtcctcaggggagcraccgagcctygttcctctttgttcttcaggcgggggtggactggggtaggtaggggatgctcactggaaggctagaagcagcaaagctgggtcccaggaaggatctagggccagaaggtcatgtttactgatggcttctgctcagctcgcctgctgaccagaggctgaagsggggaggggtgggtggtgagtctgtgagtgtagagtcgtaacccacatctgtgccacccaacagcgtgaggcttcctgggcacctagggctggatggggccaggatgggctgaggacacagatgtgaggacagtgcccaccttcccgcacacagtggcagggccatgtgtgggggacatgggggaggaggaggggctgccttgggtgcagcagtacaagtgatggagcagatgggaggtctctgcagggctcccaggtggacaggagcctgccaagtgggccaggttgggtagaatgggatgaggggtttgcaaagtggtgggtgtggggaagggccaccctggagggagaagagttctaaaaaggaaggtcacttctcactcgtaccttggagtgggaacaccggaaaattaatcccagatcagcagagctcaaggcctggtgcagagaaacccatgtgtcatggtgacgtgaaagacctatttcagattctcgctagggttcaagttttccccagaggcagaattttttcctgggtcttcagttcttcacctgtaatgagaggcgatcctgatggatgcrttttagaggaacggcagctgccctgcttacccagcatcaagttcttcctgcggccacacctgcctggccctggggacagggacgatgtcacgccaccgtccctcctagggccagctcagggccctgctcatgctgaaagagtgaaacttactttttacagacatattttgaggggcacattcattttgctaagtgagatacacatttatgaatatgaaacaggaaatktctgaatcttattagcttagagataatggccaccactgtgtatggaagctgtggaaatgataatggccaccactgtgtatggaggctgtggaaaatctgcaagtattgtttcagatttaaaatgcgtgcagctcacacctaagtgctatagggctagtatcttcgtgactatctaaatttcagttttaaaaatctctaggccaggtatggtggctcatgcctgtagtcccattgttttgggcaactgaggcaggaggatcacctgagcccaggagttcaagactagcctgggcaatatagcaagaccccatctctacaaagaataaaattagctgggacaagtgatgtgcacctgtcatcccagctactcaagaggctgaggtgggaggttcgcttgagctcaggagtttgaggctgtggtgagccctgaatgtgccactgcagtgcagcctgggcaacagagtgagaccctgtctctatctgcaccaccgccccccycccaaaaagaagtccacactcctttctgggaaaagatggggttgtgaaatatgtaaataagttgaggagtgctttagggaggggttttgaaccatagaataatgagatttgaaygctggaggagatctcaccctctagttttaacaccttgtttaatttaatctcaattccttctgtaaaaccagagtgacatcacctgcctcagcactggttgtaaagttagaggagatgaggctgataaagtgcgtgcttgtgtctaggacttaatgttgtgatgctgaggtgaggatacaggtgaggaaactgaggccgggagggggactccccacccaggctgcacgtcagtgttgcctgggagcactgctgccaccctcgcctcccgtcgctgcgtgagcaccccagggtgctgccaccttcccaggtgaccctgtcgggagcctctcccaccacaagcgcagctcctgcggctcactctggaatcatctctctcaaagctggctcctgcttctgccttgaggttttctgggcttggcagcatcacccagtgggatttgtggcctggccctggaggctgtgagttggcctgtagggttgtggctgagcctcccatcagctacacccacggggggtggggtgggggaggttgggggttgccaagctccctgcaggccttgtagccacgactttgtgggagagagggaccatagggatggaacagggggcagcgccccagggggtcctcctcctcagttgaggcaagttgagagaattgggggtgctttaggaaacccaagacctggcattcacagaattttctagaatcagctcactggcaggcagggagggagttccctggtagggatggacaaccttgcctggccatctcatagggacagatgggacaggctctatcgagtgaacagcactgagcttgtgcaaggagttactgtcattaccccctcggttgtctacctaagacctgctgtgcagcccaccagaacaactgtctcagaaaaacttcacaccaatcaccaaagattatgaccccaggctggaagcagggtcaggcttggctcatgcctggtgacctcctatgtaggacagtatttctttcattgatctgcaagtttttaaaaataaaatctgctttttcactgcacttgtaggtacatacaatatggggacataaattcggggggaaccctggactctgaycctgcccctcaccggctgggcaattttccaggtccaaccactactctgagctccagtttcacckgtgagctgagaatcagctcccctcaaagctccctccagccctgacactgtctggtctttgtccgcctcacttccaaggggaaaagcaaggccagaagaagacctggcccacagaagcccagccgggaaggaggctggagggaaggagaggtggccagctcccaggttggccagagagttaggctggctccagtcccggagcctcccccaagtcacagaggcctccccttcccaacctgcactcacagttcccttctggccccaataaggctggccattcaggtgttgactgggtggcctgaggacatatggtactgaccactcagacaggggtgggttgtcctgccccaacagacttgccccacaaacrgggtaggcgactggggctgctcagacccaagaggtcaacaggtcattacaagctggaaccagacgccagcagagcttgggaatctacacccggtgacttgctgaccagcactgagactcgcctgacctcctgattcgtcacgcaacgggcccttgttgagtgccacagaggctgcaggaacattctgccgggtgtggtggtggttgatcctcagggcaagtgttgatcagctctgatgaaacacaacacagttcagggaatatggcataaccaagagaacccagaaaattcatgtgagaaccagcttcccttgttgtctgttagaccatcttgtttaaaaataaaaaattgacttccctgcctttttcacctaccccagaatacagtctactctgaggccaatcttttatcccctgagggccagaaattgagaaattcttccgcttctcttcccatctcatttctcaactccaaactcggttccgagaaaccacacctagcaggcgaggcgtcggggatccagggctgggagggtggccacagcctcgggggaagggcatggagctggcgccagggaagctggaggagccagaccaggaaagaggccttgcttgaaaaggcttactgaggccagtggtcttggaggaggaggaaggattagcacttggtccagccatgttggggcccaggcatggccaaagattggagtagcagcagccaggcctggccgccaggcagggttgggatgttcagatctgtatccaaggttaccccagcaggagaccatcagatctgcagtccctacagcctgtggaagtgggccaggacacctggggcatcttcagggtgccagggatggggaataggcacttgatgccccagaagccctttgagccggggtactgaccttgcaggcagtgggggagacctcaagtcccaggacacccccacaatagcttgagacctgagtattggtactgggcacccctcacctgctggcaggtggggttagctgagaggatacctgtgaatcccagaaaactagaaacctatgacacatgtgtaaggtaaacattgtgactgccgaatcagcctgagacctcttcaggggtcctgccgcatcccaagccatctgagcttttaggattacacagtcctgctcagtgggacctgggatttgtgcaccctccttaccaacaaattggcagagcacctgagtgagtgctgcttgagcaaatgcgtgaaggaatgaatgggtggcagagggtctgctcaggcgtcacaggtggagggactggccagccttgctttgttgggaagccggaggggggatccacagcccctcagccaggcttgaacgcctgcaccctgcccctcgtggaacccttgagcctttcaggccttgagccatgcccctgggtggaccacccatccgtggtacatgtggtggtgtctgaggctctggggtccaaggctgtgctgggcccctccctggacattgggcaacttgaggtttgattttggtcaccacccaccccacctcctccatccccttctccatccccttttctgaagacgtgcyttcacccctggccttttctctcttcttccttggggtgcagatcctggccaacgtcttcctctacctgtgcgccatcgctgtgggcatcatgtcctactacatggctgaccgcaagcaccgcaaggccttcctggaggcccgccagtcgctggaggtgaagatgaacctggaagagcagagccagcagcaggtgaggctctcgggaggcctcgggcctggagcttgggctcagggactgtggccttgtcagagggagaggaaccagagcggcagcccctggctccgtggggcttggcgttcatccaccctgttcaggtgtttgcttctgaactttgtcttctgggctcctcactattagagggcagcttctgagcttcagggagcctctcactcctaaatctgcttctgcttgacccagatctctcctcttctgccttcctgctctttgttttgttttcgtaatgtaaaacttttccctttcaagaaatgcattgcccaagcagccagctatgacttcctgcattcctttctcagatgaccttctcgggaccaaggtcagggtcaggggcatcacgggcattccttcacgtcacgcctccaccaccactcttgctggtccaaccgcagatccaccctgtgcacctgctcatgccgtgggtggggccttgacccatcctgcggcctcagggccctgctgggtgaagtgtgtcagcctcacacccccactcaggggagctcctccctcccttaccttcccatctgaggtcactgctgaagaaggaaaaccagcctgttccccggggatgcccttgtttacattctccatctggagagaggcctcgctgtccctgcctcggtttcctggctttcctccagtctcttccatggccgcaccatcctcccagttctcatgtcactcaggcttgtacatagttttggcctggattaatctcacatgctttttgaaggtctccagaaattacacccaccaatttcctgttatccatagggttatttccccttcaaaaacaaactcaataggttgacactatgattctctgctctgggaaccatgtcatctgtgttcaggaggttctgtgtgctcctgattcactgaaattgctgttttcatagatgctgccactcgggtggacagggccttggtttcgggggccactccggagcccttggcttgcaggagccccaccgtcgggcctcactcacattctctagacagtgctgttccgaggcacacactaagtcatttagctgatgggcctccgattccactgtcctggggatgttttcttcctccccgtttaccaatctcattccttacagaaggcccccataggaggggattttccctggctgccattgtgacaaaggtccaggcttagtagcccatcgtattcgccccttcccctgggccctgtgacctgtggttattgaggagctgctgtggcctgtgtatatttaaagaatcctcctttcctggcttgtaaagccccttgaaaggcattcttcaactctgtttttttttaatactgtctcatttcttgtttgtatctgatctcgcactgtggaggcatccctctgggttctctgcacttaaaaaaaaaaaatgcatgtgtcaccgcctagctaggcgagcattctttttatataacatttgcgcagttttcagcatgtctgtctgcattgatcttgtctgtctcatattgtacaatctaggacatcttaactcacactgaaccgtcttgtggaggccccctggtgtgatgaggaaggccctgtgtttcaccctggggctgttctcgtgtagataatttagataagttatccaccctacagagcctcacttttcctcatctgcaaagtggaggtattgacatttgtcttgtaggtttcttgagggtcaaatgagaaacccagaagtgctttgtaacccatagagcttttttagaggtaggccgagtgcacggggccatgaggcctgctttctaacacccagggccatatgcttcctctgggcagggtcagtgcagggagcctgggcaccagcagagagggtcatccctgggtgccccagggctcctgagggtgctagcagcctgcccgggccacagtggtgcttctctgcattgcctgcccacgctgcagcggcagagcagacattggccccaggatggagaggtccaggttaggtggaagggaggtgcagaggtgtggggggagttgaggggtaaggtgcatcctcaggcctagctgggcacacagccggagcctagaattctccaagtgggatgaatttgtctagccaggctctgtcctgagtgtggccttgggctcgttgctgcccctctttggacttcagtatccccatatgtaaaacttttgagagatttttttttctttctttttttttttttttttgacatggagtcttggtcttgtcacccaggctagagtgcartggcacaatctcggctcactgcaacctccgtctcccgggttcaagcgattctcctgcctcagcttcccaagtagctgggattacaagcacctgccaccacacctggctaattttttttttttttatatttttagtggagacggggtttcaccatgttggccaggctggtctcaaaactcctgacctcaggtgatccacccgcctcggcttcccaaagtgctggggttacaggcatgagccaccgtgacctgctgagagattgttttaagggtaagaaggaatctatgtgaatcccactgggattggtaaagcactgttaccattgggaaggatggaatcctgccccctgtgagtttccatttacctacattctccttacgtcttctgtctctgttcaagagagaaacctgcctgccattttccttcctttccatgtgcttgacaggttttggtattacggttatgcccaactcattaaataatttgagaagtttctaacccytgatagtttgaagataatttgggttattccttaaatttggaagtcacagccaggcatgtggctggcctgtaggtgtggccaggcaggtggctatgcctgtaatatcagcactttgggagattgagacaggaggatcacttgggtccaggagttcaagaccagcctgagcaacaaagcgagaccccatctctacaaaaaattaaaaaattagctgagtgtggtggtgcatgcctgtagtcccagctacttgggaggctgaggtgggaggatcgcttgagcccaggaggttgaggctgcagtgagccatgattgtgccactgcactccagcttgggcaacaaagtgagatcctggctttaaaaataaaaaaataaaaataaaaaaggccctaatgaagaagtcctataggcctggagtgttctttaggggaagattctgtttccgtcatagataataaggttgttcagattttatatttccttttatataggttttagagaggtttttttcccccagaaacatgtccattcaaattttcaaaatttyggcataatattcttaatattttctttttatcttttgtctgaaatgggtaatgatgttcctttttttcattactgaagataatttgtgcctttttaaaatttttcttaatcagtcttgctaaggcttattgttttagcctgttcagcagaccaccgttaatctttgttgctttctttgtacatttcttatctctgatttatttatttattttgagacggagtctggctctgtcacytaggctggagtgcagtggcgcgatctaggctcactgcaagctctgcctcccgggttcacgccattctccagcctcagcctccygagtagctgggactacaggtgcctgccaccatgcccggctaatttttttgtattttttttttttagtagaggtggggtttcaccatgttagccaggatggtctccatctcctgaccttgtgatctgcctgcctcagtctcccaaagtgctgggattacaggcgtgagccaccgcgcccagcctcttatctctaagttaaactttgtcattgcctcttttttctttgggcttaatttgtgtccttttttaccttcttaaaatggaactttattgttgttttttggagactgaatcttgctctgttacccaggctggagttcagtggcgcagtctaggctcactgcaacctctacctcctgagttcaaggtatcctcttgcctcagcctccgagtagctgggaacacgcccggctaattttttgtatttgtagtaaagacagggtttcaccacgttggtcaggctggtctcgaaacctcggcctcccaaagtgttgggattacaggcgtgagcccccaggtccagccaaaatagaacttcagatgaccgattttcagcctttctttcctaaaacatgcatttaatgctacagatctcactcattacattgtttgagctttatctcacaagttttaatatgccatattttcagtgtcgtttaatttaaaatatttactaattttcattgaaatgcctttgatccatgggcgacgtagaagtgcactaagttctaaacatttgaggatttgtttacaattatgttgttttttatctttattctggtcagagaacatactctaatttcaagtctttgaaatttcttggaacttgatttttggcctagcatgtggtcagttttgatgcacttgagaataatgtatattctgccaaatctgtcaaaatctttaaaaaatgaaataatgtcaactatgtcatatttgcatctgccccaaattagtacttacctctttagtcatgawgcaaggacctcacaaccttttaacttcatttcacaagcctctgccccccactttctgcttattagtataatgtgttttagttcaacatattttaaaccccacaagtccttattgtgattattttatgtaatattcttattaatattctttacttatatttacccacagttttgccctctcaattgctcttcctttctccatttctttgcttcattttcttgaagaattccctttagtattaccttttatgctgatctcttggtaccaaattctctccatttctgattacctaggagtgtgcttattttgctttcattttcgaaagatacctgtcttcatccgttttgtgctgctacaacasaatacctgaaactgggtaatttataaagaacagaaatttactacttacagttctagaggccgggaagtccaagrtcaaggcaccagcatttgctctggtgtccatacatggcagaagggtgggctagctgaatgttatgtgatgccccttttaaaagagccttaaccctcatggcctgatcccctcttaaaggccccacctcttaatagtrttacattggcagcacctgaattttgaacagacacattcaaatcatgccaagactttttgcagataattctaggctgccattttttacttctagccctttaaaagcatttcactatccttcccgcttccttcattcctgttgaaatgccagttgtcagatagactgttgctcccgttacattaatgcatactttttcctgtggttgctttcccaatgctctttgtttttggttctcagcagttttacgatgctgcgcctgggagttttctttgcagttgctctgcttggtattcaaagagcttcttgaatgttggtttgacatctctcgtcagttttgaacattttcagccagtatctttttattgcttcttcccattcgctcctttcctctaggactcaatatccttgttagacatttttaccatgttccagaagtatctctcttctttttctgaatctttttttctttttgcacttcagacaatgttttgatgggcctaatctacagtttactaatcctgtcttcctctggtttgtcagatcagtggttgagctcttttattgagtcatcaatttcaattatatatttttctgtcctagaatttccatttgattttaaaaactggacttaggtccctaackatgtattcctattttgtcatctattttttagaatatattaaacatttattttaaagttcctgactgacaaccataataataccaatgggtatgcatttttttgttgttgaaacctggcatcttggcctttttttttttctttttttttttttttttttttgagacagggtcttgctttgtcactcaggctggagtgcagtggcttatgcatcttcgagttcctgggctcaagcaaaactcccaccccagccttttgagtagctaggactgcaggcgtgtgccaccatgcccagctaattaaaaaaatggttttttgtagagatggagtctcactgtgttgcccaaactggtctcaaactcctggcctcaagcaatcctcccactttagccacctggcatttttaaaaattaaatactagatattgtgratgggaaatagtagtgcttctgaataatgttgtgtctctccagggaagatttacttttcttgtggcagatggttagagcaggggcagataggaaatagcttctcaggggtcttacctgaaaggctggtgcttttctcatggtatcttgaactcctcagcaatgtgaggctactgaaagcttagcctcttagtctcactttctgcttggattcttggtctcttgccccatgcaaatactaaagggtaatagtgtacagaaagtcagactcactgttgtatggttctctttccccggggtcttagcccctctactctctctgccttggaatccttgctcacagtccttgtttctccagccccttgaaagccctcatcattgctctctctccagcctctcgaccctggtcgcaagggaaaagtggtggagtgcattgggctcacttaaatgtgtttcccttcccctgagatcttggcccctcaaatcctggctgctttggttgtttccattgcctttaaagagctaggttctttttatgtattttatccagcttttatagttgttcttggctggagggttggcctgctataagatcctctatagcaaacgtatacatgtataaaatcgtaaaagtatgaaaaagggtatactaggaaaagtaagtcatcccaccttcatttcccctagccatccagcccccatccatgaatcaccagtcactattatctttttaatgtaccctttcagaggtttatagaattttcacacacacacacacacacacacacacacacacacacacacacacagatgatagcctattcactcttttgtactaaatctatttttctttttttgagacagagtctcactctgttgctgaggctagagtgcagtggtacaatttcgactcacaacttccgcctcctgggtttaagcgattctcctacctcagcctcccaagtagctgggactataggcatgcaccaccacgcctgcctaatttgtgtatttttagtagagatggggtttcaccacgttggccaggctggtcttgaactccttacctaaagtgatctgcccgcctcggcctcccaaaatgctgggattacaggcactagatcttttcacctactatcttagagagcattctaagtctgtattgcattgccacaaccttcttaatgactgtgttcagtcattatacaaaagtaacaatttattttgttgcgctctccatagatttctaggttatttccaatcttttgctactgtaaacattgctgtaataaatatccttgtagcggtatttattatatcatagtatatatgtgcaagtgtatctgtggaagaataaaaacctagaagtggaattgctggatcaaaggacatttgcattttaaaaattatatatatagctactgtaaaatatacatagtataaaatttaccattttaatcattaagtatacaattcagtggcattaagtgcattcacaatgtcgtgcagccatcaccactgtccgtttccagaactttttcatcatcccaaagagaaactctgtgcccattaaacaataactgcccattctcccagactctggtaaccactgttctactgtgtctctgaatttgcctctactaggtcctttatataagcggaatcatgtatttgtccctttttgactggcttatttcacttagcatgatgtcttcaaggttcttctgtgtcgtcgggcagatcagcatttctttcccgttaaggctgatatctccttgcatgtatacaccacgttttgtttgttcatttggacatttgggtgttttctgcggctttgctattgggaatggtgctgctgtgaacacgggtgtacagatatctgtttgagtccctgttttcagttcttttggatatatacccaaaagtggaattgccaggtcatatggtagttctgtgtttaattttttgaggaatctggaatgtgctttttttgttttgttttgtttttttgagacagagtcttgctctgtcgcccaggttggaatgcagtggtgcgatctcagctcactgcagcttccgcctccgggttcaagctattctcctgcttcagcgtcccgagtagctgggattacaggtgcccaccaccactcccagctaatttttcttgtatttttagtagagacggggtttcaccatgttagacaggctagtctcgaactcctgacctctggtgatccgcctgccttggcctcccaaagtgctgggattacaggcatgagccaccacgtccggcctcctatagagcttcaracaatttatactccaccagcaatgagtgagmgtatacttaggcacttaagttttccttgtttatctagaaaatacctcattgcttttggaaaccctccccaaaggattcctatttgaaaaccccagccccagggaaccagcctcaaggcaggagtgacatcctgtgggctgtttcctgccttatcctcatttggctcaagccacagacagataaactcaagtttggaagagttcctttgctttcttggcctacactgtgtaatatttggcaagaatatacaattataaagaaataaaaaagaggttggcatagtggctcaacgcctgtaatcctaacactttaggaggttgaggcaggaggattgcttgaggccaagagctcaagaccaacctggccaacatagtgagacctccatctctaaaataaaagactgatagaggctgtattagggttctctagagggacagaactaatggaatagatatctatgaaggggagtttattaagttttgactcacatgatcacaaggtcccacaataggccatctgcaggtaagagcaaggagagcctgtccgagttccaacactgaagaacttcaagtccactgttggagagctggatgcatccagcacaggagaaaagtgtaggctgtatggaggctaggccagtctctcttttcacctttttctgcctgtttatattctagcaaactggccactgattagattgtgcccacccagatttagggtgggtctgcctttcccagcccaccgactcaaatgttaaactcctttggcaacaccctcacagacacacccaggatcaatactttgtatccttcaatccaatcaagttgacacttagtattaaccatcacagaggcatattccttcaagccttttttttggtcctgatatttgagagtgtcctagccatgttttatcctgattaagagattataaatgtaacaccttcctctcacatagtatagcagctgagagccaagtaccagagtctctgcccctctcctatggccttaggggagataagtgttaagtagttattgcacagtgcctgcacatagacaytcaaactctctaccatcatatgattgttggatacaattttgaagatatagaaaagtagaagaggccaccaaaacctcccttaatctgggactttttttgaaaaataatttttaaaaatgaatatggtattataaattagatatgcagttagaaaaactcaggtttgcttcatttttttttcttttttatagagctaaaatgaaaccccttgaaagtggtttagtayactcaccatgttgtgccaccaccacctctagctagttccgcaacatcttcccccaaaagaaaacttgggacccgagcttgatttttatttgtttttattttttttaattaattaattttttttttttgaggcggagtctcgctctgtccccgaggctggagtgcagtggcacgatctcggctcactgcaagctccgccttccgggttcacgccattctcctgcctcagcctcccgtgtagctgggactacaggtgcccgccaccatgcccggcwaatattttgtatttttagtagagacggggtttcaccgtgttagccaggatggtctcgatctcctgacctcgtgatccgcccacctcagcctcccaaagtgctgggattacaggcgtgagccaccgcgcccggctaccgagattgatttttaaaaccagatagaaagggacctggtgagccctgggacaggccttgcacgtgaggacaagggacccagaccctagcacagtcccacagtcctatgctccagcctcaccttgtggtggatacctgtctgtactgggggttggggagggatgaccccgctggtcatcttggacctggatttgcatccacagcctctgccagcgtttttgggggactgtgagccctggctttctctgtgtggtgttggtactttacctctctggtctttagtttaattttctgaaaatgggattaaaaataataccattgttaggggatagtttgggaatcacatgaaataaggcagaggggagtctaaaaaccatgaagccctttggggctccaagatgccgtcacgctggcccccagcccctggggaggcaccggctgaagtcagggtggtgaggtaggatgggagctggctggggcctgtgcatccttccccttctctcttccagccaggacagaggtcactccctcccaaggcattggggctgacgttgggagtggcgtgggctctgggctgatttgacgtttcagaaacatcagctgacgggtcttcggagctgagtgcaggccggtactagaggctgcatgaccccgtttcactttcctcctgtaaaagctcctcatgagaataaaaatgagataatagatggaaaaacactttggaaagggccgcagacagtcctggtatgagaggaaacagaacctggtttggaagtggctccaaagagccatttgaggtcagtgtcagagcaggccatcccttacttacatgtgtgcttaatgtcttttttaagaaaattctccatttaaaaaaattatgagtgtctcctataaaaacaatcgttaatctaccctctgcaaaaaaggggcctccttccagaattgagtgcccagggtccatgtctcactttttatttggtcaggtgctcttatcttttttttttttttttttgagatggagtctcactctttcgcccaggctggagtgcagtggcacgatcttggctcactacaacctccacctcccaggttcaagcgattctcctgcctgagcctcccgtgtagctgggactacaggtgcccaccaccacacacagctaatttttgtatttctagtacagacggggtttcaccatgttggccaagctggtctcaaactcctgatctcaagtgatctgcctgccttggcctcccaaagtgctgggattgcagtcgtgagccccatgctcggctatttatcttgttttctaagctgccttaagagtgtgcggctgaagggcagccctggccatgtggctgtcccagcaggtgtctcctcgctgggcctcagcttcctcctctgctgtgaagtgaggtgtagggatgcgctggtgacctgagcccgctctctctcttgccatcccctgggaagttgtaccttctgttatgaagatgaccagcctcctaatgacagtcaactcccagatgggtgggcagccagccatggtccaggagggtgaggcggcacagtccctcaagcacaggcatccctttctgcctcctcactggggtgagcatgtccacatgtcaaagggtgcattgaggcaacagagcatttgggtaatggcaagggtctcagattccagtggctttgctgctttaacctccctggctccagtctccttcagggaggtagtggagcctgccctgccctgaggccttgtggatttggagctcttggtgcagccctggcatgcgaagcgtcctctttgcctctgccgaacacatatctggcttcgcaggcagtgccatggcgcttccctgtggtgcggggccgccagggtgcatgctgaccttggtccagcctcccggctctgtgggcatgtgagggtagagcaggaggcccagaggacagaactggagttgtttgtctttattcccatgtgaccacacttcaggggttagttggggaccttgagggttgctaagcaccccagccgccacctggcaacaggcggcacccagaaaacccactcagcacacacctgctgccaggtggagctacaaaactgagcctctctgaatcatactcagaatcacttcccagggatcggaacatggttgacggaggatgtgggaagatggagggatgacaggggcaggcctgtgcttccttcacacgcgtcctgtgtggttaactggccctgtgcctggtcctccctcggaggtgaggactgtccacagtgcccaccctcagacaggaggatgctgcagccagggcacgtagagggagagcccagggcagactgcacagggtctagggtagaaagccatccccatcttcacccttgggatcctggggagacagctgaggtggacgctgggtgggtttccattcaggtcttgggggactgcacagagacacagctgcctctccccacctctccttctgctttaacccacktgcagggtcacctgttactagggatggtgtttttccttcakgccggtcttacagggaagaaccgcccattgaccacaagcgtcaggcccctctcctgggagccccggagcttgggacactgggaggctgccatttcytaagcttggattgtatctcttgcttttctgaatgttcttcctctgtaacctttgcccaagcctggtcactgtttcccncaagaccttttgctattaggacaaggtgtcatcaaccctgagccctgttcttataggcgcttggtaggggagaggggagtcagagccagaggccagttgcctcttggcctggggttgggcttctagtgccaagccccaccrtgccactgttatcctggcaacagtgaggtcggggcagggggaccactaagagtgggaagaggagacgaagctggtgtcgagtgggagggctgtgcctctgcctgtggatccatagctgctctgcgtcttgctcgttgcaccgtggctgcatcatggcattctccgcgtctaatgtaatgggtcaaatccattgtctgcttcacaggagacacacagacacgtccccacccccagcatcagccttgcattgtactcgctatcttcttcacagaaccacccacaaagatatctaatatttttagtttttcttttagcctcgaatgcctctcagtgtgagaaaagccaggtgcgttccccataatgcgaagtaggcactggtccttctgttggttccaactctcacctcttggatgtcacagaatgctcttcatttcaacattccaggacttagcaaaacaaatccacatttcagataatgcagatgatgaacccatagaaaacaggttgtcctaaagcagtggtgggttcctggtggcagtgggaggatgttggctgtgtcagggtggacctgagcagagctggtgaggacagtcctgctgacggcccatgcatgggctgtgtggcctctgagctgggctctgctgggctgtggcaggtcttaagcctttgccacatcctccagcagaatttttctccaaacagttgtagaattgctggagaactgtagagttgtagaattgtagaattgtgcattgtggccagggttgtggcgcattttatatttatctggctgtaagaatgaagttttgttagtaatgagtgtagttttattgaacatttattttgtgccaggccctggatggtgttttcattggattatttcatttaataatgagatctctcatttaccagctggcacttcctcctggctctatttgggagatctgttaattaacaggaagaatcagttaggtagtccttggaccacagctggcctgtgggtatctgttttgtttgaccttcccagagtgttaacattttctaatacttaaacatttgtacattctggataaaaacctggatttttgactcacttagaaaatggaaagatctgtcaacaaaggttgcaagtaagacttgcattcacattctaactgggtcactgagcccctcttgagcccaggagtccaacaccagacatggcaagaccttatctctacaaaaaaacttaaaaaaaatccaggcatggtggtggtgcgcacctgtagtcccagctacttgggaggctgaggcgggaggatcacctgagcccagcaagatcagtgtgcagtgagctgtgactacacttcagcactccagcctgggagacagcgggaccctgtctctttaaaaaaaaaaaaaaaaaaaaaaaattcagaccacaagtatttcaggacttttctaggcactggggatacagttgtgagcagaacagattctagtgtgggcaacacacattaaacagacgagtatgtgctatgtcaggagctgggaagggctgtggagagaaagcagaggacggagcttagggagtgccgtgggtaaaggtggaaattttgtcggtataattttcttgggcctttatgcccagggtggtactgagttgctgcatctgggtcaaggagagaatgcaaagggtctgctttccgccagtcacagatacraaccctccgcatccttctcaacacagggctcgaggcagctgctctctgcccatcagagttggcacagtacttgtgactacagtgttctagagctgcaataggtagcagtatggtagccacttgtcatatgtagctatttaaattaaacttaattaattagaaaatgttagtctttcagtagcactagccacatttcatgtgctcagtagctaaatgtggctgccatattggacagcaaagatacagaacatttctgtgattgcaggaagttctattagcgctgttctagaggatggtggcttgccccttgggccaggtctcctagttgacagctcgttaactcttcaaacctctaaggagtagtacctgctctttgccaaataattcgtggtgagggctccaggtaccacacacgtggccatctttgggcccagtgggctgtctcctgagactgcagtcaccttggcctacacggtggcccctgtctctggggactgcacaggagaccaggccagtgaccagaagtcccacatgttcggtgtcccctctcctgctctggcagggtaagagctctgggctgaccctgggtctgtgtgatttccgcactgttccagatgacatggcctggtggcttgttagtctggccccgccaacactgagattaaatgtggccctgcttctcttggggcctgttgatctggggactctggggacactggtctggtgcctgttctcatgctggaggccttgtttccaaatatgctgacttttacagttatgcagctcctccctcctctacrttcctacagcatttggctgaagactgtgaagcactcctgccctgggagaccagtctctcccacgtgtgaccattgccccacccatccaagctctttggagtactgtttacctttgaccttcccagcatttagctcagggacatgcatagatgaccagtgactgtccttcgagtgactgaggtggggaacacatctcttgggcaggggcagcacacgtgggccccctagtctaaatggcggcagtattggagtttccagatttcacacattgtggtacttcgtcccctcatccgggagaggtgagctgtttgggctctggcctcccaaggttactaggcctggtccttctctccattccctgcctcccacagccccctctgcttaggtagtcaggccatgatggacgccctggtggggtgcagtgactttttggcttccaaattggctggacactctaagaatctggattaatcgggaccaagacagactggtttgtgaaacatctgtgggtatgctcacagcctgtgatgggttacagtgacatgtatttgtcaagcacatggcacttagaacacatgaacacacatggacacacctaccctacagacaaacagacttcatatacatacctcatgcagacactgtagacagtagacacgtacatgcagctgcatgtgtgtacatgtgcaagcgctaacgcatggacacacacacacacactctccacattcacactcattcccagccacctgagcactatgggtctctctcgacctaactgtctccctcttacaaggatgttgtagaaacttagcttctcaccagccaacctcatttatccaaatccctcctggcctccttgctgtaattaactcctgaatgcctcatcagagcctcagctgtaacagctygggcccctgggaacagtgctggctgcctcccccttctatctctgtcctgagccagtgcgaaccaggcctggcatgagtcatccctgagtagaagggggcttgggtggttccttctcggagccctgtggaggccatgccgacagattgccctggggtgagaagctcaacacatctgctctcagctgagatcccagcccaggaggcccagcatcttgccccaggcccttctcaactctctaccccactgcaggcctgggtgcttcttcccaggatctgggcaggttcttgctttacccaggaaacctactaggaacttccagggcttgttgttttttctctggactttgattcttttcccagagagggtcagggccttgacttttattaccatgctgtatttttaggataaccatcaaggacttgaaggctgaggagaatgaagastttaccctccttcttctctgtgcagaaccacatctgggcacccaggcctcggcccccagggtttggccacatccccctcctccggtccagccttccacccctgctcggctcttcccgcagtcttctctctcggtttctgggaatgggagttcaccacctctcagggcagcacattctttgaactgtttgactctttaaaaattcttccttctctgaaagcaacattctgttccccagcagcctttcctcattagctttctctcttggggcctccaaagcaagtcttgtcccttttmtacatagcagctttcctcagacttaaagacagcttcctaagaagaagggggtgggggggacctggggctaaggacacagcctggttaagctggaccggggcctttttatttttctgtcacacagcccrgagccaaggggcttgttcaggcagctactttatgctgggaattcattttattttattatttttatttgtttcgggatggaggctcgctctgtcacccaggctggagtgcagtggcgcagtctcagttcactgcarcctctctctcccgggttcaagcgattctcgtgtttcagcctcctgagcagctggtattacaggtgcccgccacgaagccctgctaatttttgtatttttagtagggatggggtttcaccatgtggcccaggctggtcttgaactcttgaccttaagtgatccgcccacctcagcctcccaaagtgctgggattacaggcgtgatccaccatgcccaggctgggaattcattttaaatctaacagcatctcaaatggtaggtgtcccccttctamcccccgcaacattggtacattgtgtctctcccattctgttctcctgcatttggtttgggagtctcaggtacagactatgacctctatcctttttgaatttcatcctgtatgttgcaccagatttcagcagaacaaaagccacgagccacttgtcccagtgacacgccagccacacatttctaaatacatcctctgtatcttctgagaagttctccttctggaaagatttacactttaaacaaagaggcctaagagatgcccattttatagataaggaaccaagcccccggggtgaagtacctgcccagggcatgggggcctttgcagcctaaccccagatcagtgagctttgctgtaccccccaaaacccctgggtgatatggccactcctctgacagatgttctgattttaaacatgctttgtttcttcagcaaagccacctttgggattagtcattactatcttacgtcaacagatactcctctgtttagtccaggccatcagataaaaagtagcttcaagtgaaggaagggtcctttttccacagtccggttctctggaaccctgccaccccctaccgaaagtcacagtccaagagtgaagccaccacaggccacagcttcaagacaccacagcctgaacaggtgcagtcctgggagaagtggcctctgtgtcctcaagtaatttttataaaggagagacaacaccaaaggggcctgaaatggatcacaagaattcacatcatgatgaatatcaccattcaattgtgtactgattattgtatatcctcattcaatggctatagtcattgtatatacagattcagtatatatgaatcagtatgtatgaataatgatgttcagtgatgggcattgaatagcgatgaaatgcccagtgccaggagctttcaagagataaggctcactggccgggtacggtggctcatgcctgtaatttcagcaatttgggaggccaaggcaggcagatcacctgaggtcaggatctcgggcagatcacctgaggtcaccaggctggccaacatggtgaaaccccgtctctactaaacatataaaaattagccaggcatgatggtgtgcacctgcagtcccacctactcgggaggctgaggcaggagaatcacttgaacctgggaggcggagcttgcagtgagccgaggtcgcaccattgcactccagcctgggtgacagagcgatgccatctcaaaaaaaaaaaaaaaaaaaaaagatgaggcgcgtttcaatctgaaaatcacactataaaacaattgtaacaataaaaaaggattacaggaaaagaaaacatacaaagaatatggaagctgccaagtgacccctgccccctgggcgctgccctgttgcaccttcccctgcggcagctcctcacagtggggtcctgtgccatccttgggctttgggaagggggcaaggtcgccatacgtcgtgtcctgaggygcgcagccatttccacctcaaaacacatcgcactggctttgagggtcttgttttctgcagcttccttataccccagtcctcggttacaggttttgcctcctagtttgatatggctggaggcagtgcctttagtaggtagactcttccagaatgttgtacaaataacacccctacacacacacacacacacacacacacacacacacacacacacacacacacacacacacacaccctccagctgttcctttccttcaaatcttgttcctcaagagagacttctcaaacctcaggtgcacaggtgtgcctcacggtccgtggcttccccaccctgatgagcacgggtgatgctgagtccacagccccaccagccacactctgggtagggcagcctgaagtcctggggatgggctcggctgaaccagggctgcacycccagcaccggctcggccactctgtgtggcagtgacgagggcaacccaagtttccgcgggcgttggcagctcgggtcctcgggcagcggctcctggccgtggagaggcaggcaggcgtctgctgggggtgttggggagcagcaggcctctgtcgaggtccggggctgtcctggcatcaggcctctcacgctcagcccagttgagtactttctgagtacacggtggccactcatgcctgctctgaggccgggctttgccacgtgggcccctcctctcctcagcctgtgaggagtagcacagggcagtgaggccggggaggccgggtgacccaccagtgtccttaggccacagggtggggagggagccatggaggcagcactctcctcctccgcttcctcttctctgcttaatgtgggtcccagggaggactctaggagccgccaccaccactgcccctgtaccccccacccctgcctggtgcctggcaatggcagccacaggacgtctttgaggacatcagatgccgtggggacagtggattgcagaggaggagcggaccggggtgctgggagacacatcagaggctgttgcaagttccccccgaggcagccgctgggccgtttctgtgaggaaggacccaccggaaggggctgcctgattcccacgcccaggtggcatggagccctggggagggtgtccagagccagagccgcactgtcagggccttactatgttacaaaacaccagggcttcggtctgggtcctgctgcttgcacagaaagccaatcactgtgacagcarttattgccaaggaatacggctttaatcgggtgctgcggtagaggatatggggactcagtctccaatccatctctctgacctgctaaatccggggtttacacggcagggaagaaatggaacaacgcgcgagacaataggaatgaggggtcctgagtctcattgtctggatgtggtgacctggttggtgagtttcagttattcagtacttcatttgagaggcctgaaggtcctttgctgaggaaggaactcagataagtagaagttttaagccttaagagcagaaggatccatttctatgtttatttaaaagaacagtctatgggacttttggaaaggttttaaccgatgcccctgggcactggggggaccttcacatctgtagcagaacaacattaaagcagatgagagaactggggtgggaaaagcacaaaaactcacccattccaggggtctcagagccctgggttcagggtctaccgctaaccctttgggatgtgtaacagacaacttcatctctctgtgcctaggctttgtcacctgcaaacttgagacaatattgcacataaataataccgggttgatgcagaagttttagcaaaggagagggatgattttgactgggtggatggtgtctgtcacctggtgggtgctgggttcatgagagctacagagcgaagccagcccagggtgaccgttctgtctttggcttcctaggaggaccactgccttcccccacccccattttggctgtgtgtctccttggttcgtgcctggccataggttccccmtcctcaggttatgtccaagctgactaggaagtctggagccaagcccaaaggccttgagggatgttccctttctaagaaaactgtggtccttccagagaagccgaggtcagggataggatcacagctggaggcaacaggaagttccatgtttatttccagtttaaaaagtatttttaaaaagaacaaccaccagcaccctatagcaactttgaaaaacgtttcaggttttccctaattcggtcgtccaagttaaatgagccttttctctttgcatatagccttctgcctttatttctatgcacacatagatcccagcgtcagcttcacagaacacaattttgtcccgctcttctctctctgtactttattgcaatgataaacaatactgttgtttcattatggtcattcttaaggttgtagaatcttccatccagaggatgtgtcattttaattagccatttgctgggtatttgggcgacttacagttttttccacaagggttaagtcaagttgcaatgcagatcaccttctacgtatatctttttacttctgttggatttggggggataaattctcagaagagctattaatgggtcaaaggtttggaacattcttgtgactcttgaaacgtatagcaactgctatctttggaagagcaggctctgcttccacgctggggagaccaagccacattgatcatccctggggccctgagcaatcctaggctgctatgggtggcctctctcccctgcactcctgtcccccactgtgggacccatttgccagttcacctggatcccagcctccttccttcccccaggaacacaaatgaaggggtgtcggagtctttagccagggctctggaatggtaatcagggatcttctgtgtgtgtatgagcatttttctagaaggtccgtagctagcatcacgcactcatgaaaggggccaggatccaggaaagggtttagaacctctgaactctaagggcaaacaaggccagcaccaatcgagaggcaccaacaaagtgggtgttagtgaggagggaggaacagacacccctgggcaggggccaggggctctctggagaggtgacatgtgaggtgggtgtcgaaggtgtggggagggaggaatgttccacagagagtgacaccagaagcagaggacagggaggggtaccgagaagaggaaacagtccagctcatctaccctaaggggccacaaggagagcagtgggggacaggactagaaagacaggtcagtgccaccactgagggtgctgggcaatggtgtcgcacagcttagaggacatccagataccgtgccaaaggtggactgaatgagaggagccggccggcacctgggagacacattcagaggcggttgccagaggccctgaggcttggggggtggcagggggagggcccctccctccgtgggccttcgtctcccagacccccctcctcctttcccctctgtcaggttccgtgtgtcctttcttctgcacgcactgacgtcttgtttaaaactcgtcttgttaccagaatgactccaggtagactgttggcctgcttcactttttgagcctgactataaggtttccacaaaccacacagggaattggcagcctgaatttataagcatagctcctttcttgttatttaagtttgattttctgctttcagaacatatttgtgctcttagcaaaggttatggaaatatataagggaaaaaaatggaaattccccctgtcccacccccagagagaagctcacggccgcttcactcatgtggcccttccgaggctcctgttttgggctccagggctgccctggttttgtgcctctgccgctacttttgttctgtattggtagacagtctccgagaccccagccataccgggaggaggctcagcagtgtctggagggagaaccagtactgtggtcaggggcatggagctcccacaggactggattggactctcaggtccccaaggttccaagagagcctgaagaggcttttctgaagggacagaactctgaggtagacccaggagggcaggaaaggcctgtgtgggctgtggctgcaggagccactgcatgtaggctgggagggaggccagcacggtgctgtgacgttcttaaacctcacgttccacgtccctccctgcccacacacctgaccacgcctccccatgctcctcacacatctgcgccctcctcacccaagcagcaccctgaatgcacacgtggcggggggggctgagactcaaatggaaggcagggcccttccttgtatccctttgttgtcccacctgcagtaagcagagctcaggagaccaggctgagtgacccagagggtttgtgctgaccctggcacatctcactggaactcaacctaaaaacttctggccaacttcaaagcccagaggaacattaagccctgtctttttgagccacctgctgtctccacaccctcagtcactcagtcatactttctatcatgtgactgtaggaaaagctggactatggtgagcgcttcctgtgggccaggcactgttctaagtgcttgccggcaatgaattgtgtccttcctgctttcctgcctaggaaaccaaggcacagggaggtttagtatcctgccttatgccgagaccagctcggctggggagaccctaacccagtggtgctagagaaattaaagacacgcacacagaaatatagaggtgtgaagtgggaaatcaggggtctcacagccttcagagctgagagccccgaacagagatttacccacatatttattaacagcaaaccagtcattagcattgtttctatagatattaaattaactaaaagtatccgttatgggaaacgaagggatgggccgaattaaaggaataggttgggctagttaactgcagcaggagcatgtccttaaggcacagattgctcatgctattgtttgtggcttaagaatgccgttaaggggttttccaccctgggcaggccaggtgttccttgtcctcatttctgtaaacccacaaccttccagcatgggcgttatggccatcatgaacatgtcacagtgctgcagagattttgtttatggccagttttggggccagtttatggccagattttggggggcttgttcccaacaccttatagccacagtgagtgcaggcagggctgggggctgagccaggccagcactcatgatcctgacggctgcctcctcctgccccgcgagcctcaagcacaccagggccgcacactccagtgcgggctgggatccccgggattactgaccagagaaacccagccccagcccagtgggtgctgcctcccacctgcctcctccagactcctcagctctgcctgcccctcaggactcccagcagctgtctgccttgaraggctgccctcaagagctggtggggcccyatctctggcttttcttgaaaaccttcctagaggctcatcttttctgcaaacccagagctttttccacaatgtctggttagttaggttccgagacgggtcctgtcccacccagcacttcacccatttctttgcattgggcatcctctcaccacacttgactggcagagagaggggagttgccaagcaccaaggctgcctaagttgctatccctgggctgcagggccctgggagaactggatgccacttcccaggcttcggtggagccagggcagggcgtactgggattactttgccttctcattcctgagctgtagtgccatgcttgaggttaacagtgaagagatattgctgtggaaatggaagaataagagtgtcttagtccacattcatgctgctgataaagacatactcaagattgggaagaaaaagaggtttaattggacttacagttccacatggctggggaggcctcggaatcatggtgggaggtaaaaggcacttcttacatgctggcagcaagaggaaatgagaagcaaaagcggaaactcctaataaacccatcagaccttgtgagacttatttgctatcacgagaatagcacatgaaagtctggcccccatgattcaatgatctccctctgggtccctcccacaacatgtgagaattctgggagatagaattcaagttgagatttgggtggggacacagccaaaccatatcattccactcctggcccctccaaatctcatgtcctcacatttcaaaaccaaccataccttcccaatagtccccccaaagtcttaactcatttcagcattaacctaaaaatccatagtccaaagtctcatctgagacaaatcccttctgcctatgagcctgtaaaatcaaaagcaagcggccagacatgatggcttacacctgtaatgccaggactttgggaggctgaggcgagtgaatcacctgaggtcaggagttcaagaccagcctggccatcatggtgaaaccttgtctctactaaaaatacaaaaattagccgggcatgggggcaggcacctgtaatcccagctactcaggaggctgaagcaggagaattgcttgaactggggaggcagaggttgcagtgagctgagattgcactacagcattccagcctgggggacaagagcgagacttcgtctcaaaaaaaaaaaaaaaaatcaaaagcaaactagttacttccagatacatggggatataggtattgagtaagtatagccattccaaatgggagaaattggccagaacaaaggggttacaggccccatgcaagtctgaaatctagcagggcttctttggagcttaaattttaaagctccaaaatgacctcctttgactccaggtctcacatccaggtcacgctgatgtaagaggcaggttcccatagtctcgggcagctctgcccctggggctttgcagggtacagcctccctcacagctgctttcataggctggctttgagggtctgcagcttttccaggtgcatggtgccaaggtgtcggtggatctaccattctggggtctggaggacagtggccctcttctcacagctccactaggcagtggcccagtagggactctgtgtggtggctccgactacacatttcccttccacactgccctagcaggggttctccatgagggccccgcccttgcagcacacttttccttggacatccaggcattaccatacatcttctgaaatctaggcagaggttccccaatcctcaattcttgacttctgtgtgcccacaggcttaccaccacatggtagctgccaaggcttggggtttgcaccctctgaagccacagcccaggctctgcattggccctttcggccacggctggagcggctgggacacagggcaccaagtccctaggctgcacacagcatgggcaccctgggcctggcccacgaaactactttttcctcttacacctcagggcctgtggtgggaggggctgccgcaaaggtctctgacatgccctggagacattttccctattgtcttggtgattaactttcagctcttcattacttacacaaatttctgcagccagcttgaattatcagaagatgggatttccttttctatcgcatagtcaggctgcaaattttccaaatttttatgctgtttcctttttaaaactgattgccattaacagcacccaagtcacgtcttgaatgctttgctgcttagaaatttcttccatcagataccctaaatcatctctcaagttcaaagttccacaaatctctagggcaggggcaaaatgccaccaatctctttgctaaaacataacagtcacctttgctccagttcccaacaagttccttatctccatctgagaccacctcagcctggaccttattgttcgtatcactaacagcatttttgtcaaagccatttaacaagtctctgggaggttccagacttccccacagtttcctgtcttcttctgagccctccaaactgttctgacctctgcctgttacccagttccaaagtcacttccacgkttttgggtatcttttcagcaatgtgccactctactggtaccaatttactgtattagtccgttttcacgctgctgataaagacatacctgagactgggaagaaaaagaggtttaattggacttagagttccacatggctgaggaggcctcagaatcatggcgggaggtgaaaggcacttcttacctggtggcagcaagagaaaatgagcaaaaagcaaaagcagaaactcctgataaacccatcagatctcgtgacatttattcactatcacaagaatagcacagaaaagaccggccactgtgattcaattacctccctctgggtccctcccacaacatgtgggaattctgggagatacaattcaaatgagatttgggtggggacacagccaaaccatatcaaagcgcaaaaccactattactgcttcaggcaggggccagtgccaggcatgctcaccttgtcctaatggtgtgattccctgcaagaaaggtgataaattctccccatgaagccacagagtgcagaagatggggacctgtagcagagctgattctcacaagggaggcctctggtttaccaggtgctgagggcccaagtacaacagcagactctggggacctcttggcagctccacccagaggagtggagttgagccttcacctcctcctgccccaaagcaggtgcatctgacatgcaggatgagctggcctctctcgggcctcagggacccctgaactcagcagagtcagagcacttgcatggtgcccccctgcccaggccttgtcaggaggcaaggtccctggctcctgctcctgtggcctgggacccacagccatccagccaggccctaggtgctgaggaccaagccactagttcttggttttctggccacccaggacccagggtggtaatgcctgggacctgcaccctaggcacagagctcctgggggtcctgagttcccgcccatgcactcctcacctttcagcagccgaccccatggcgacacgggcctggccacccggaagcactccaccctgaaggtcagcgggcacctgtcctccagccacatctctgccttccggttccctggcctccccctgtgcctgctgcggtttcatttgtatcttggccccttgctggacacactttctttagttgtgtccctgccatgagctagttctcatgccccttggccttttacagtttccatcttgcaaaacctcaacttgggattctcccccaagtgccccccaccatccttcaccagacgccatcatcaccctcctcccctcagggatgggggcagtgctcccctcttgaccagctccctgctgagcctctggtccctggcttcgcctccgcagcaccacattctgtccctggttttctctctccgtactgcttatccaacccatggcttccaggcggatggttcagcccactgcctctcctgagcgctgcctgcaggtgcccgcacagaggccccacagcgcctcagaaccaaaccctgtctttgccctcatatctgccgctcttcctctgttccctgttccagagaccggcaccgcccaagccacagacctcttctgacaagagccacatagtaaatatctttggctctgtgggccatacggtctctgtcgcatctaccccactctgccattggagtgttaaaacagccagagacaatatatcaacaaatgagcatggctgggtgccaggaaaactttatgaaaacagaggatgatttgagcgcaggagtccaagaccagcttgggcaacatggcaagaccctgtttctacaaaaaatgtaaaaattagctgggtgtggtgatgcatgcctgtactcccagctactccagaggttgaggtgggaggatcacttgagtccaggacgttgaggctactgtgagccatgtttgcaccactgcactccagcctgggcaacagagcaagaccctgtataaaaagaagaaagacagcagcagtcagattgggcccacaggccacggtttgctgaccctgatctaaaccatgcccagctctcaagccatgtttctgtttttacctccacagaaatccctgaaggaccctggtgcgctttgcgtgtgtctgtgcgtttgtgtacacggctgcctccaacaggagtgccctcagcgtcgcgtcttgggctcgaccaaggctccttcaggaaggcctccttgatgcctcctccccggccgaccttggcccctgcttctctcttgcgccgtcctctgctctctcctttctgggcacagaacttgccatgctgcgctgtgctgggcatggttacctgtgtccccgtgagaccctccgctctctgaggtggacgttcttgctggttttgtgtcgctggcgcctcgtgtagtgcctggtctgctgtcagtctttgatcaggtcaaagcagaattttgtgagcgatggctctgtgcagccgtggcgggtggctgaggtgaccccgcagggctcctgccgggagggctcacggtgcagcagcccacgcaggactgctgcgcttcttgtggcacgaggatgctgagcacagagccacgttgggatgcttcactgcgtttctggctcccctcagttgctctgaaggggccattgccaccctcagccttgtcagggccagaagctgcctgtcccagacccctggctgctcccgaggcagatctgtgaggtctctctggagggcagcatggttccctgctcacgtttcttgccaggatcggggcatttcttcccagaagtatctgaacttgcctctagcagggcctacctttgcctctgmccctctcctgcccctcacaggagaacctcatgctttccatcctgcccaagcacgtggctgacgagatgctgaaagacatgaagaaagacgagagccagaaggaccagcagcagttcaacaccatgtacatgtaccgtcacgagaacgtcaggtacgccggcccggggcgcgggctctgatggcagagcaggctgtggagggctgcatctttgtgggacccgctaggtgctgtgggcttcaagaggttttccagggactagaagcaaggcctcccacagcattcatcagcctggcggaggaagctgccagcagatgttgaagctacagtgtgctctaggctgcttggtccaaccccatcatagaacagatatcacctggagcggggaagggactcctgtgaggtcacccagctgttgagggccagcactggggctagagccctgacctgtgattctaggaagaaggatgagttcagcctgggcaggagtgggcagtgtggggtggtccccaggcaccacagggagggaggcctgcaggggaagtctgctaggacaagtgcaaggtcagagccctgactttacctggaagggtcagggtctcactgtctgggggtcgtgagggaggaccttctcctgccctgatcctggctgccctgtgggttggagagggagctggcagtggggtcgggtacacctggctgcctggagcgtcacccccacggttccttcctcatgcagcatcctytttgccgacatcgtgggctttacccagctgtcttytgcctgcagtgcccaggagcttgtgaagctgctcaacgagctctttgcccgctttgacaagctggcagctgtaagtccctggccccgcctggctctccagcggggcctgccctcatggcctctgcctggcccccatccccggccccatgattttctcccactgtccttcctctgctttcttggccactcctccctcactgaggaggggctggagcacaggccaggccctcccctttcagaaataccaccagctgcggattaagatcctgggcgactgctactactgcatctgcggcttgccygactaccgggaggaccacgccgtctgctccatcctsatggggctggccatggtggaggccatctcgtaagtgggatgcctctgggagggaggctcccagagcaagggccccggycctggacccagggagaagcaggtcttccgcgctggccatggcccctgggtgggggatctgctggaagcagagactgggacacagcactggttgatgggtggcgcaggctcccgctctagaagctgggatgtggcttaccttcctcacagcccaggggacctgcgaggctcccccagcctgtggggcacacttttccagccttagtccacgtattctctttttgccagaagttgcagttgtgaattttctcacgcctcctcacacttgctgggacccccacaggggctccccatctctcctcagtgttttctcaccgtgacccccgaaggcactgccctctccatctcgtgatgcagtgactgtaagaccctggcagaggggctcagggatgaggctggatcccaccccggcctctgtgctccagccttaggctgtgagggaggcaaactctcctgccctcactgtcccctactcttgcccctgctccaagtgggcttgcagctctcggatgggcagtccctctggttgacttccagcctctgcgggacccggggtgacatcaggcaccaacacggaaagggaagctcctgccgaggcccctcccccatgggatggagtccaggaagttgcctgctctttacccccttctccgagggggcggctttgcatttttaccatcttccaggttaaagcccgtctagtattgccctggaaagaaagcagtgtggcctttaccccaggggtggtagtccaggaactctaacattctctccctgccctgtcagacacgttcaggcagggggctgttcacggctattttcttcacctctgtgtctgcagcaccttgaacgtgcctggcacatacttgatgctcagtgaaatattaactgcacgaatgaataaaagagtaattggcagagagaaactgaggcccctygggaagtggggatagggaggaaagtcgcttggtgccctcgtcctgctggcctgtgatgcctgactctgggctggccctggcctgccttaccccccacccaacaccaagctgtggggaccttgccaggccccctcttgtggaggggaagaggcccacaatgaatttctcctgcaggagcaggggcagctggctgcctcgtgaaggccacaccctgaccctcctttctgtgtgtacctggcaggtatgtgcgggagaagaccaagactggggtggacatgcgtgtgggggtgcacacgggcaccgtgctggggggcgtcctgggccagaagcgctggcagtacgacgtgtggtcgactgatgtcactgtagccaacaagatggaggccggcggcatccctgggtgagtgccattccaagggggcaggtttgaggactggggaggggaccgtcccctccatcccccagggctgtgaccctgatgagggacagggggcctcagagaaggcccccctacaaccccggaacagcattcctcctgtctcgccctggtyctggccctggctaaggccgttctgacctgccttggggtgaggcctctttgggcctgatattggatgtggcttttccttcctggaccctgcagtagcctgtcctcctgtcccctttaccgacttagggggctgcctcccctttacccactaagggggctgccccagctctccttatgycagagcccaggtctccccaaagggagagtaatgagcagtcatcagctagcgggctcgcaggcagcgttttgcaggtcgcagtgcgattacacgtcttacttgagctcccttacaggataatggaggccctgcctttagcagggcgaggctgagggaggatcagcccagccttccccatctgggccagggagcttccttcagtggcatttaggattcttggcctcagtggtgactcctcagaaacaggttttattatctcttggcagcaggggttgcaactgagaaacrtgcaaggtgggggataattggatcttgtggctcacgcctgtaatcccagcactttgggaggccgaggtgggtggatcacctgaggtcaagagtttgagaccagcctgaccaacatgacgaaaccccatctctactaaaaatacagaattagtcgggtgtggtggtgtgcacctgtaattccagctactctggaggctgaggcaggagaattgcttgaacccgggaggcagaggttgcactgagccaagatcaagccactgcactccatcctgggcgacagaacaagactctgtctcaaaaaaaaaaaaaaaaaaattccttatcgcatttgatctgctttacagcggatcaaagattgaagaaagattgtactcctgtgtcgtggctccaacactgaggctgagatgggagtaagtgccatacggcccacacagctagttagcggcccacacagctagttagcggcccacacagctagttagtggcagaactgcctccacttggcctctgccccacatgcccgagagacacggggccgagcagcagcyggtgcagccgtggtccgtggactgtcccctgggggtgtgagggccacctctggccgacgctcagggcctctctctctgcaatccaggcgcgtgcacatctcccagagcaccatggactgcctgaaaggggagtttgatgtggagccaggcgatgggggcagccgctgtgattacctagaagagaagggtattgaaacctacctcatcattgcctccaagccagaggtgaagaaaacagccacccagaatggcctcaatggctcggtgagttccccaccccaccccacccaccccacccaccccacccctggattagggggttggaaaggaggagattaaggaaagattgcagaagaggtggcaggacccagcagtggctggctgtgagaggtgagtggcaggctggcacccttcccaagggagagctggtttctgggggagatggtgagtgtaattcatggcaggttgcaatggaggtgactgaagcatatcccaagaccacatccaggagggggccgctggagatgtgtcggtggcgcccaggagagcagctgggttggggctcagggtctcctgcatggaggaagtgagtgaagccacaggagtgacgtggatgctcagggagaggctcagagaggagggtgggggtggggtgactggtcatgggggaggaggaccaaggccaggaaggtttcctgagtgggaaatgagggaggaatgagatagaagtaatagagcaggggtgtctaatctttcggcttccctgggccacattggaagaagaagaattgtctcgggccaaacaaaaaakactgtgggttgaacaagcttgcaatcgtgcatcctgtgggcctgccctctggtctttttgtgggatcccccgaatatctacagacctgaagcactcagcagcttccccaggtctgtccaccaacccccaaacacctcctgtcagtctgattagaaaccaccagcagctgttgcagaaatggatccctttaccatcccctgctgaatctggaggttgtcttattttttgtaatctcatgtcaaaaccctttcctccagttatgagagtccatctaacaagacttggaattaaggagcttggtgactgtcagggaagtcgtgtcatttgagactgctctatggctgaggctttgcctaattatggctaaagcaaagcccactctggtgaggctgccggagtgaaggctgatactccccgctgattctaacctcgatgtcagtctcatccagtgtcattttaaaggctgtctctgacaactcccaaatttgtatctccacccccagtgtcttccctgcactcaacatacagccacttgtacgtctccatttgtacatataataggtatcttaaatgccacctgcccaaagctcctgccctccttcccactccataacctgctctccctcggtcttcccatctcagttaatggcagttccatccttttattaacaactgctcagaccaaaaagtttgaaatcatccttgacgcctcactttgcaatccacaagcaagttctgtggcctcagattgctctctaatcccaccgcctcccacgcccttgtcacttccagacctgtccacgccactctcwtcccatgcccagatcatggctgagctctcctttcctctaggccctgcccaatggagcaccagcttcctcaaagtccagctcccctgccctcattgagaccaaggagcccaacgggagtgcccacagcagtgggtccacgtcggagaagcccgaggagcaggatgcccaggtatgtgcagggctcagggcagggggtcactgagggccagmtgcrggcaggcaccaggaagcaatacgttcctgcagcaggagtcctgtgctggggagacctggccaccacccaggacctgctcctgcttagcactgtaaccatggasaggtcacccctccagccccgcaaaaccccactgtctcctcatcagttacatgccggggtgagtaaggtcaaaagaggtgcttagctcggaggcctttgtagctctgatggcccggaatcctgtagatttgagatcagtgaggacatccatggaaaattatataggatctgagaccattttggaagtgagatatcagacctggactcacccctctggctaggttcaagccccacaagttccatgcaagatgggatatttccttagcccccaaaggcgaggaattagcatgctgtcccagagtgcagggtgcctcttggggagcacccagaactggtccctgaccgcagggcgtctggagcacgttcactgatggaggtcagtgctgcagagatgggatgtctgccctgctcgggctcaccgcgtgagggggacaggagagctggccctggtgccattagagcagatgccgtagaacaagagggtagatggggctcagggtaaattaggtttttcttgagtcccccaacattcagtaacttttccttgttgcagttttcttgatagaaagtgggggtccagactcagggcactcactagcaaggaggacacagatgcagctttagcagcctgatttttcgggccctgaycctcagccagggccacgctgctcccggatctgcttcaggaacaggttcccgctgctgccacagaccatccacgtgattttacagaaggggaagatgtggctggggaaacattatctggggtcaaactgtcaaccagtggcacacctgtgcctgtgcttaagaccagggagtctttttttttttttttgagatggagtcacgctgtcacccaggctggagtgcagtggcgcgatcttggctcactgcaacctctgcctcccgggtgcaagagattctcctgcctcagcctcccaagtagctrtgattacaggcgtgtaccaccatgcctggctaatttttgtatttttagtaaagatggagtttcactatgttggccagtctggtctcaaactcctgacctcaagtgatccacccacctcagcctcccagagtgctgggatgacaggcgtgagtcaccgtgcccggccccagggagtcgtgactgtggctcccagatgcactgttgaacccgttcagacagctctcagcccgtctcagtgactattcagactgatggctgtgtcatcacagccaggattcctgtttttggagttgatgctttttctttggaactgggaataaaagggtagtgggtgccccagctccacctacccgccccttgtcagccctctagtgatgaggacattcttctctctcccatcactttccccctcagatcttcctttccaaatgagccagatgtgagttcctttaacagttccctgaagccctagagttgggagccattcatgtccccaggctgccaatgtatatggcccccacatcaatacagcaggaagtgccaggactgcctcagcccagcagctgtctccgattacaggtctcctgctcaggagccaggggctgctccctacaatgctgtcattagcggaccctccctgcagagctctgggtggggggcccggggagccaggaaagactggagctttgggtgtagatccaggccacatggagccacgtgggagcatggggaagacttcccggaaagggattttagagctggagggattggtcctccgagtatgccctcttttgttcctttcctcctccacctctgtctttcccagctcttccccaccactctgtcccatctgccccactcacgctgcctccctggctcacaggccgacaacccctcattccccaacccacgccggaggctgcgcctgcaggacctggctgaccgagtggtggatgcctctgaagatgagcacgagctcaaccagctgctcaacgaggccctgcttgagcgagagtccgcccaagtgtaagcgccacccggaagcgtccaggcccaccactcctcccgggccctgacaagggattcaggaaactgagcatcccaaatacggcccccctgctaggccaaggcagatgtggcatttgggattcatggggcttgttcccactgcagagtaaagaagagaaacaccttcctcttgtccatgcggttcatggaccccgagatggaaacccgctactcggtggagaaggagaagcagagtggggctgccttcagctgctcctgcgtcgtcctgctctgcacggccctggtcgagatactcatcgacccctggtgagggaggggccggggagggccacgagtttcctcggctgcggtggtgccgggcsgggggcgggggcaggtgtctcagcgggagcctgayattggggagcaagccagtctctgctccctgacccccactgggacggcccccacaggccccaggagtgctagacggcaccctgggcatccttccttttccctgccccgcgttttggagcagtcctagcgtcagaatggggatctggccaggatcaagagagctgagggayagaggcctccagaaggctggagaccttggctagatgggcscacactgattcttgggacaaagatggggacactgcgtcagtctcagtcaccaaggctgacctggcccctctcttggctcatcttggtaaagatagattttaggctgtgggcacagactgacgccctctctaacgcagcagtaggtyctccagggcaaggtgtggcctcctggagtccccagctggtgaagccctgtctgagggtgacgaccactctcttgttctccctttctcccctcggccaatcggggattccccgtcacagaggaggggtctggaaccctgctgggattacagtttgtcaggagccttgggctgggtcacactatctaaggttgcgggtgtgtgaccacgtgcaggccactgcaggctccggcagcatctgtttcctcatctgtgaaatgaggagaacaacccctgccctagcggacactcaggactgtggtgaggctcaaattcactcattccataagtattgattggttgtctgcttcatgcgtggggatcaagggctggggctatggcagcgatgcggcacacagaaacccctgctctcgtgaaacttgggttctggtaggggaagctacaggcaaaagcaattaaacaattaaaatatgcatccatgcgagagtaagtactgcagacacagggaaggcaaggaagggaggcgggtatgctgctggggagctttgttttgttttgtttgcattttgatgtgggatggtcagagcaggacttgctggcaggataatatttcagtaacgcctggaagcgggtgaggggcgagccttctcctatctgggggacacctgcttcggatagaggtgctgaggctggagtggcctggcccctggaggcacagtgaggaggcatcgcattgggaacgggccacaggaagagtagcaggagtccagcacagacgtggggcctcctacacgccactgcagggtgccagcttccactcttaacacaggaggccgccagaacaagggagcagaggagtcccctgttgtgacatatgcctggagaggctcactcctgctgagaacagcgcttagtgagcacagcgggagcagtgagaccaaatagcggcccagacaagccactgtggtggccaggccaggccgaggatagaggagkatcagtggttggattccgtcgatagatgctgaatgtattttggagacagagctgacaggatttgctggcagattggttgtggggcgtgagtgtggagttgaggatgtctcctgggcttctgatctgagcaactggcaggaygggggtgccgttaaccaagatggggacaaggtggaaagatgagagtggagaggcaaagatsaggagtttgctttgggacacgtgaagtttgcagtgcccacaagccaaggaggccagcatccatgatctggagtttggagggcgggtggggttggagacgtgaacctggcatcrccagcatgcaggctgtgctgcaacacgagacttgctgagctcaaggcagcgtgtccagatgcagagacagaaaaggactcaagaaaccaagcgagaaaagtgtctcaaggaggggtgagaggtgactgaaaatgggacatggatttagctaccaggaggcttctggggctcttggcaaggacaccttccagggaggggttaaacgggaatgggtgtgagcagagggtatagagaacaggtttccgggagttgtcaggttaaggtggatgtgttgagtgtgtccactgtgaagctgggggyggctgtcacaggcagactcttagcccccggcagcgagggagtgatgctgctccgtgctctgtcctttcagcacagcgacatggcaggggtgcattcctaagatccctgcccaagtttatcctgggctgtgcccaggccacctgtgagttgttccctctctgggaaatgtcccaggcagcagctgcagctggagagtggcccgctcccaggccggcactcagctggcggcccgtctcatcagggcctttgtcctgttctgcacggcaggcagcagcaattccctggcaccgcgtggagctgtacaggctcgtgctgtgctgagaggcctccccgtcccctgcccccggcccctgtccccttcccccttcccccggtccttgtctgctggcccctgcccccggtccctgtctgctggcccctgcccccggcccctgcccccagtccctgtccgctgccccctggcccctgcccctgtctgctgtcccctggcccctggccactgtccgctgtcccctggcccctgtccgctgtcccctgccccctggcccctgtccactgtcccctgccccctgtccgctgtcccctggcccctgcccccatccccgtcccttcctctcctagcccctcaccccatctcactgtcccctctggcctctcccaattgtcttctctctgtcacaggctaatgacaaactatgtgaccttcatggtgggggagattctgctcctcatcctgaccatctgctccctggctgccatctttccccgggtaagaggcacttttctactgagctcagaagcctctggaagtgagtggcactccctgtaaaactgggcagtgatggagttattctttctgtcaaatctgacaggcagacactcctctgttaggacggtccaggcacttgcccatccattcattcaccatcagcagagcactccctctggctgggccaccaggctgtggcaggctgtggtgggccacggctgggccgtggtgggccttgttgggccgtggcgctgcagcacgtatgagtayggcagagtctgggtaaacaagaacctgggtagagaggaagtggagggccggctggaaggtgggttggccccgatggtgaaggcccttagaagccagactaaagggattaaaactttctcctgtaaggcactgaggtaccaagcagagtttttttttttttttaatcagaatgacaaaggtaaagcagtgtttaggaacataaatctgacaggtggctcgccaggtcacttggagccaggataggcaggagtagctggccagagacgagcagccctgaaaactgttcctgccctggcctcacctcgtcaccaygtctgctgtggaaagggctgcgacctggaggctgtgctgttgaacaggcacatcgaggaggtccaacacagcgtcagaactcccacgccctcttctcagctctgccccttggtcagctgtcrggtgactcccaggcagagtccgttttgaggctcctgggactggaatacgggaccagcctgagttgctgtcagtcacgtcgcaggagaaaggactggcaaaggctcatggcccttgaaattctgttccttctaggcctttcctaagaagcttgtggccttctcaacttggattgaccggacccgctgggccaggaacacctgggccatgctcgccatcttcatcctggtgatggcaaatgtcgtggacatggtgagctcctgctgtccttgttgaagggacgcccctgttctcagtggagaagggcttctgtttgggtcacacaagcagtttctcagtccatccctccaccgtcatgtagctttggagtggctcttaggttcccaaacacatcatccccacctagtggaaggagtcttrtccctgtcatccagggagcctctgggatggacttgtttccttgaagctcctctcccagagtccgagagcacagttccatgtgcccaggcctgtgctaggtaccttatgtatgttgattcatttaatctgtgaaaaagtcctgagcagttgtaccagtatctgcagtttcatagggagaaactaactctcaaaaagggtaattggttgggcgcggtagctcacgcctgtaatcccagcactttgggaggccaaggtgggcggatcacgaggtcaggagttcgaaaccagcctggccaacatggtgaaaccccatctgtactaaaaatacaaaaattagccaggcatggtggtgcacacctgtaatcccagctacttgggaggctgaagcaggagaatcgcttgaacccaggaggcggaggttgcagtgagccgagattgagccgctgcactccagcctaggcaacagacagcaagactccgtctcaaaaaaaaaaaaaaaaggtaattcacttgctctaggtcacacagccaggaagtgacagagtccagaatggaggcagttctaagtcccagtcctgtgtattcttcctccctgagggggcagccaaatgctttcttggggaaaagggacaggagttgggagcccagatctattggtttagaaccactgggcacgtattgagcactacatgcctggagctgtcatcagtgttctcttgtcagttgtcacggcctcctctaattgtggtagtaccatatacactatcttccttttttttcaaatataatgttattgttgtactttaacaattggagcacacggtgccgggcgcrgtggctcacgcctgtaatcccagcactttgggaggccaaggcgggcggatcacgaggtcaggagatcgaaatcatcctggctaacacagttgaaaccccgtctctactaaaaatacaaaaaaattagccrggcgtggtggcrggcgcctgtagtcccagctactcaggaggctgaggcaggagaatggcgtgaacccgggaggtggagcttgcagtgagccgagattgtgcactgcactccagcctggcaacagagtgagactttgtctcaaaaaaaaaaaaaaaaaaaaaaaattggagcacacaaatacaaccaacatggagacttattctgccagtggtataagtgaaaaagctccagggctgcagctaatcagaagtccagtggggggccgggcacggtggctcacacttgtaattccagcactttgggaggctgaggcaggcagatcacttgaggtcaggagtttgagaccagcctggccaagatggtgaaaccccgtctctactaaaaatacaaaaattagccagccacaatggcacgagcctgtaattccagctacttgggcagctgaggcaggagaatcgcttgaacctgggaggtggaggttgcagtgagccaagaatgcaccactgcacgccagtctgggcgacagagcgagactccatctcaaaaaaaaaaaaagaaagaaaaaaaagaataagtctactgggaatgaggagttaggggctccagagcctaccttggccaggggttgctggtgcccactacccagggaagagaagccccaggccccctgcatgtcacaacatgcctggaacctggcacccaggtgtggaggtcaccactgcatggggtcctggacactgtacaggacacctggagatgctgtcactcatggaggggtaaaaagctagggaggtgtaacaactgctcatgctagaatgacatggcgggaatcgcgcaagcaagacaaggttgccctgtgggtgaaagttacaaaaagggggggttgattccggttctggatgcgctttctcccggccgcatctgcccagtagcagaaccagtaaagaatccagaaggcagtgaacatccccccaatggaaggatttgggcagagactagctgtcatcacggggaggctgtgagtggggctcatggtcccgtggcccctcctgaagcaacagtgtgatatggggaagaacatgttggatttgaagcctaaagacttggctcctacttttggcttttctgcttgctaattgtgtttgggcaaatctggcccgagttttctgtacaatagggacagtactaaaaatactcgagagagtttttgtgaatgtcaaatgaggcaayggcgaggctcttagctgcagttactaactttcatatgattagtccctggtaaatttccccatctttcccggtatttctgggggagccgcgggaggtggcagctgagcgtgcactaccatgcacagccctctgtgaccagcacctgctgttctcttgaacgtgtgtccctgcccgccgtcctggcctccagctcagctgtctccagtactacacgggacccagcaatgcaacggcagggatggaracggagggcagctgcctggagaaccccaagtattacaactatgtggccgtgctgtccctmatcgccaccatcatgctggtgcaggtcagccacatggtgaagctcacgctcatgctgctcgtcgcaggcgccgtggccaccatcaacctctatgcctggcgtcccgtctttgatgaatacgaccacaagcgttttcgggagcacgagtaagatgaagcgtgactggggatctgtattgtctccttcctcccgcccgcaaagtcctcagttcaagctcatgggcctgtgctgaggtggctttctgccactaggggtcctcaaaggcttgttcaagaaccagttcctggctgctcacagacgtatcactgtttggctaggacctgagaatagattcttcccattctccccgagtggaggacttgggataccccggtgcctggctgggcatcaggctcttgttcccagatggggcctgactgtgctgttatctgtccaacagcttacctatggtggccttagagcagatgcaaggattcaaccctgggctcaatggcactgacaggtaagggccacggcttcccctcctggcctgcactcacagcccttcttctagagacaggaatataacaggcccaagcccngggatctcaccctccygggaggcacgtgacctgatacgtgcaggttagagaagctggcatgggttcctccaggagggctgcagcagtgcagtgaggagggaaggaaataccaggtggatggcagctgcatgtaactggctggcaggacagacaggcagcaggaaaatgaggagggaggaagacgctttggatttggacctggcttctgagcctgcagcaggcagtaattctctgtgggtcacaggcaggtccgtttccatgagttgcaatttcatctcttgaggaggatactgaaccagaagttctctaaggtccctgccagtgccaaggttttaaaattttatgattccatgacttgaacagaccttcaaggaagtttagaaataaaaagatgacctaatagaagaggggtaaaacctgcatagcccttagcaaaagaagaactctaaatggccactaataaatggcactcaagtaatcaaggaaatgccagttacaccctagtgagataccatcacacacgtaccggtccagataactctgacaatatcaagtacaatagtaactcttacactcctggtgggagtatgagttagtacaaccgtgttagaaaatattttgatctatttagtaaggttgaaaataaacctgtgtcccagcaattccactcctacatacacacccacgcagacgtgtgtatatgtgtatatatatatacacacatcttagagaaattcatgcacatactcatgtcccaggatatatgtatgagaatgtccaargtggcactgttcgtaatagacataccccctcccccaaaacaaatgaaaacaacccaaatgacatcaacaggaaatggatacataactggtatattcatgcagtgaaataccatacggtaatggaaactaaccacagctccacataaaaatatgtatgaacaaggtaaaaagccatggtgagattgtaccccagtcccatggctatgaaatcccatcactgatgtctcttgcttctccaaattcctgcatggttgtagctacctctgtgatcagtcaggcaatgcagtgtttcttaaatacctggggagcagccctgatgtgaataccaggtgcagccaggaggggccaggggttgcctggctgttggagaggagcccagtgagttaagaaaantttactgcccgggggagcccgacttgatgtgaaagggcctaaggagccggggtgagctctagggctggggtggcaggaagcagcaccatctagttggagggaatcaggccccctccaggaggcagatgacagccctttcagttgcacacgctctgcccagcaggctgcccctggtgccttccaagtactctatgacggtgatggtgttcctcatgatgctcagcttctactacttctcccgccacgtgagtgccgcctgcacgatccccgctctgtgcccacagcccacagggcctcctgagaagcagcccngggacctaagagcccaagctcctaaggaatggggcttcccttcacccagccccacacgtgagcctggtcaggccaccgccttctctattcaggctccttcctcagtcacacaggaagacagttcctcacctcttccgtccgaccccctccaggatggtgaaggaagcatgggagtgaaggtgggaggggatagagtgaaggcacaaacatcttgaatcaaatcaatatcccctaggccaggggctcatggcccccgcactccccgtggcgctgagggacattaacacaactgaccacagagccagaagagaaagagaagggagctgatggactttctgttgggttaaaaggaaaagagaaggccggtgcagtggctcattttgggaggctgagggtggaggatcacttgagtccaggrgtctgagaccagcctgggcaatatggtgaaaccctgtctctactaaaaaatacaaaaattagccaggcatggtggcccgcacctgtaatcccagctacttgagaggctgaggcaggaggattgcttgaatctaggaggttgaggctgtagtaagctgagatcacaccactgcactccagcctgggtgacaaagtgagacaccccccccaccccgccacaaccaccgcactcaaccggacaaaaaaggaaaagagaaggaagagagggaagagaaagatcctctgtacttagggcccaatgttagttcaagtgccccctactggctttccagggaagtacagccttcccaagccacttcttacccaaatggcgcctgctagaaagggggactccaccctgagttgggagatccccactgctgccacctccacgagacagacctgcagctgaaattaggtcccaagaggccccctacacacggaaggcctcctggatctctgctgtaaytacggaggctgggaaccgcaccactattgggtggccttttgatgaggtgcaatctttgcagggtcttacttcccttgccatttagccatcttccttccagcctttccaaggggagttcctccattcacgttcctgtttttcttctttttttgagactgagtctcactcttttgcccaggctggagtgcagtggtgcgatctcggctcactgcaacctctgcctcctgggttcaagttgattctcctgcctcagcctcccgagtagctgggattacagrtgcccgccaccatgccyggctaatttttgtatttttagtagagacagggtttcaccatgttggtcaggctggtctcgaactcctgacctcaggtgatccgcctgcctcggcctcccaaagtgctgggattacaggcatgaaccgccaygcctggccattcctgtttttcatccttctatccagtggccagcttagagcacatgcctcgccttgtctgtgtctgyaggtagaaaaactggcacggacacttttcttgtggaagattgaggtccacgaccagaaggaacgtgtctatgagatgcgacgctggaacgaggccttggtcaccaacatgttgcctgagcacgtggcacgccatttcctggggtccaagaagagagatgaggtgaggggtgtggtctcagcccggaaccatgaggccatttgtctccatctgttctttctttcaggcagcccccgctgggcccaggccttctcagggacaggggactggggcctaggtagggctgaayctaaacagcaaacacaaataagcaaaagaggaatttctccggcctcttataaagtgcactgctgtaggcatcgtgatgtgggccgtacagctctgaggccatgtgtcagaagacaagactttggctagagcccacctttctgttgcctgtgaacttctccaaacagagtggttcccagctctacggtaccctcgtcttcacagctggggctgttagaggaactagagaagctgttttaaaatttattcaaagtagtggcygggcacagtggctcaygcctgtaatcccggcactttgggaggccgaggcgggtggatcatctgaggtcaggagtttgagaccagcctgggcaacaaatagtgaaaccctgtctctactaaaaaatacaaaaattaactggacgcggtggtgcacacctgtcgtcccagctactcgggaaactgagacaggagactcacttgaacccaggaggtggaggttgcagtgagctgagattgtgccactcaactccagcctgggtgacacagcaagactccatctctcaaaaaaaaaaaaaaaaaagtagcgatgagctatttttaaattattcagagttggaataatctacagccgggcatggtgacatgtgtctgtggtcccagatacctggtgttcaaggccgcagtgtgcttcgatcatacctaattgtgcttgtttactgccactgcactccagcctgggaaacacagcaagacccactcttaaaaaaaaaaaaaaaaatgctggrataatctgactgatgtgtgagtccaaaaagctgagtgcacatgtcatgcatggaagatagatgcatttctccaacacatcatccagtcagtcggacatgctttgagcacgttgtccgcacctctttttaggagctgtatagccagacgtatgatgagattggagtcatgtttgcctccctgcccaactttgctgacttctacacagaggagagcatcaacaatggtggtattgagtgtctgcgtttcctcaatgaaatcatctcrgattttgactctgtgagtgcccatcccaccctgcactctggccatgaagcyggcccattccacatcacatcctacaataggctgcagaggccagagaaactggcttcattttcccagataagccccttccgcaatacatggacttctgcagccacctggaactgctgggctggggaaggggaggtgaggtgggagcccgggaaatcacccacagggtcacaggatraggataaggactggccaagcaacatctcgagacctctctgtcctgggactgtctcctcaaattcagagccggtcagcattgactgggtgacctgtataccagggagaatgcttttacacacgcgcggagcccccctaggagactgccgattttatgtcagtgttgaggttgtggaaacaggcccagaaagttaggaagttctcccaggatcatgtggcagataagcggtagactaagtaacaactttgataggaaagtgtctcttgggtttagtggggtccttgtaaacaggtacatctgtcactgggttgggtcattcctctcccttgactgctgacaattctttcctgaatcctggcctcagctcctggacaatcccaagttccgggtgatcaccaagatcaaaaccattggcagcacgtatatggcggcttcaggagtcacccccgatgtcaacaccaatggctttgccagctccaacaaggtagctaaccccagtagccagagagatgaggctctgcccccaaggcaagagattggcagcccagacctagcatgggggaaataagaactgctgtgcaaagtggtcccagacacacaccaccagcaccacgtaaatwtaaataagaaatagggtttattgagaaagttcggcaagcagagaaacaraacagacacacaaccccctgctgttcacagctcaggcctaagatggttgtgttctgtggccaggccccctaaggctctgtgctttcataggaactggagagcaattgtcaacaagggaaactgaaagcatggccttcagaactctggctgacggcagcctgttcttttgttaagctaatttagacctttgttcagctaccaggagagaaaattaggtgtaggagccctggtcccaagctctggtcttaaaacaccatcatcctgctttacctctacaaccatcccacggccctattatatggatgaggttaaagaaacacgtccaaggcgggtcatccccctccagtgcttatcacctagttgagggatccaaacaaggacaacctgacaaaacctaaggaccaggaccaggcccagccaaggtgaaggggyccgcctcryggtcagactcacaggtccgtctcctctgctcaattgcccagtctttgcctagacctgctacgtgaactttgtcacagtggcaagtcagagctagcgtggctgcgactcctttgtgggaggaaaagtaaggccttgaacatctaggtgtagggaatccacccccagaacactgccagggaaggcagcagagcaggctgctgcagtgagcggcccctgacactttctccacggtcccctggcacaggaagacaagtccgagagagagcgctggcagcacctggctgacctggccgacttcgcgctggccatgaaggatacgctcaccaacatcaacaaccagtccttcaataacttcatgctgcgcataggtgagcacccccagctggcctgccccgcagcaggctcccttcccatgcaggggcctggcccaccaccaggagagacatgaggctcaggacaactgaggcaattcgggtggggaggttcacgcactcacagggcaaggagacctgaaagacctttagtccagacgactctagatgactaaaccaaaaacccagctgatgtgatgatccgactatactgtgcctactgttacaatagaagcttggcctgcctggctgagaagtgagtttgtgatccatttccagaggggttgctgtgcctgctgaggacatggcttcccagacaggcctgctctttgaaaggagttaagatcacctgctgcttctactgagggggtatcattcctgagtgaggtcccaggagacttgaaataccagctgtgttagaagctggccactaccatgccgagtaaatctgcatatggggggggggtggcggctgacacctaacaagcacacggataaacaggagatgtgatttccaccctccaatagcatacagccaagttgaatgaggacaatgatgtgttacattaggagctttgtggtacaggtctggagaggagatggcttctgaggcccataacaaggtgtggcctgtggctgtgctgaactttatgcctctaccctaggcatgaacaaaggcggggttctggctggggtcatcggagcccggaaaccacactacgacatctggggcaatacagtcaatgtagccagcaggatggagtccacgggggtcatgggcaacattcaggtatgtccagtggcacagctggcacgtgctcagactcggcatgagaacaaaaccggaacagtgctttcccacgtgcccctgcctcccaccctggccctgaacagtaagtccagaggcagagacgtggggcaagtggaaaagaatctctgcaatagctagcctcagcacaggaagaaacacttccacccatccacaaaatctgggctgaagttctagatgcatatggcctacctttgggtatgaaccttctaataccttgtgatctgtctcagtggcgtctggcagaaaagctccacgaaaggggcaaagggacagaagagcaggcagtggcagtttccaggtaacagtgctgccacccaggtgaccatggccatcctaggagagaagtctctggatgagaggaggcccccagccagtcactccagggttctccttcccacccgctgctcgccacgggtggaagggcttggccctgggaggtttggggagtgtcccgtactgcttgggacccatggatcagtgctcggctccaaccacccaaagcccccacccgccctcagtctaggctccccccgtaacgccacgttcttgctccccctccctctccaggtggtagaagaaacccaagtcatcctccgagagtacggcttccgctttgtgaggcgaggccccatctttgtgaaggggaagggggagctgctgaccttcttcttgaaggggcgggataagctagccaccttccccaatggcccctctgtcacactgccccaccaggtggtggacaactcctgaatggcctcgagcctgcaacagtccaaaccggaagggagaatttattttttgaaactgaaggaagtcccgaccttcctggattgaagtgcacactcatggactttaggtttagaaacctcctcagccttcatttgttcgtggatgtgtgagctctgagggtggccctgctattcctstgygtgcctgtagtgtccccagcataggggtcttaggcatagggctgaacagtccttccagagccctcgttccaatccctgccgtccttgcccctgaggggccctgaccactgtgagcaggagggtggcagagctgggacaaagctgcctttgccgctgggctttccgggactgtggagggagcacaggcggggaagctccacttcagacagsgcttggtggggcaggacatggctcccattttgaagggaggtctccatgtggtccgagtgaggtgagacggccctcgtcctggtgttcctgatcatcttgaaaggttcttctggaactcctgtccccttagtcatgagaacagaaagtgcaatatttcctttcacctggcaggggaggggggatttatttctgaaagaaaaatatataaacagatcttctacatttatatttttaatcttctgttaaatacactttccgatattgccttgccttttgagctcttgctacagtcgcctttgctactgctttaagagaatttacaggtattgataaagaacaagactgttttattaaaagctttattcaacttgaaagtgattgtggaaattctgttaatatcacttatctgaggagtgctggtactttgctgactcatgccactggtccccaccacaggcctggaaggcaagagcttgaaggtctcatcatagctcactgtaccccggaacgcctgctgcctggccctgtctcttttattcttaaactttcttctaaagggtactccaagctggctttaatcccctgcactgttcctggagctctcccacacggaggttacttcgtggccattgcagggttaagtctgaacgtggccttgggccagtcatgactcctatctgtgcctgggcaagggagggctacaggagaacctggtcagccagacacaggttttcatatctgtgagtgacccacacgccaaggaaccagaggtgccagcaggtcagaggcccatggttacggcaaatcaggacactaaccggagagcctgcaggagagggaagacccggggggcgcctgagtccccctgagtttatgggcagatttctaactaactgtgctttttcagaggggacttcctagtacattcacagctctactaaacttttaggaaacaaaatatgagacacactgaactctgattattttatcctactgctttctcacaccatatttataaagcagtggcctagaatacactgcgcctaaccaaacactgaagaacttccttttcaaaagtttcaaacaggaaaatgaggaaaaattacttaaagctttcataaaagctaaaaatactttccttttttaaaaaaaaaaatattgggtcttccttattatcttcattagtgaatgtgggttatttttccatttatttagatcagtgtttctcaacagaatcaagctattgcagtttgagtggagtgctacatttctgtgagagccctttctgaaaattttaggatttttggcatctctattcctggcattaaattagtagcagttactgtgacaacttaattgcctggtctttcccagaagttaatgccctcaataatttgatatttttccataagtacttcttgagtgatacacctttttcaaaaaatggcttttattgccccacaaatgattttcaactaaaatgtatgatcaactaatacctttaaaaaacatcttgagcattttaagaagggaccaggtgatcatgggaattgttcaaaaatgccagtgtctatactcaaacctgctcttccatccagatgaacaggtaggtgtctgttttcatcagaagggtgatgtacccttcatcagacagtactacccacctggtactgtcttcagtactggttacttacctctgatgtgctcccagtgcagtgaaaacaatctattaggagaccagactcatatccaacttttctccttttcttgtaaatgaggcaaacacttgatgcaagggcttcgtacagaacagagtttcatgagatgctcgttgctcctcccatgaagtggataatacttccactcctaaaaagaaagattccatcaatctcattcagtgcagctgggggaatcggagcctggatcactgatattcaatctcattcagtgcagctgggggaatcggagcctggatcactgatattcaatctcactcagtgcagctgggggaatcggaacctggatcactgatattctggacccactggacccatacagttttttttttttttttttggtctggactaaggctgccccttactggaccaatgcaatctagagactggggactggaatctaactgcgcagagaaatcaaagaccgatggtgtgaaatctggggcagcttcaaaatttctgcctcctaaaaacatttcacccaatttttcattattgcccatgtcacatttaactgaaacaggttcaccaaaaaatctctctctcagccagtctggaaggatttccatttagagactgctccgtagggaggagtaagtgtgtgctgacgtgtcatgtccatttgtcttcacagtgaaatgagtcttctggctccatccaccataactgacccatgactcagccttatcattaggtgtctttcctgaagcagggcccccagtgaaaacaaatcataggctgcgagaacactgctgaggtgggtgggcaaaggagaagggaaaatggggacaatcatgtttaccatttacaaagaggaaggaaaagactggtagaaacaagaatgttctatcttaccggtctgagtaatgtatagtatataaacagagaaagtgtctcaagaggtctacttcatggattctacctattttccctgtttcactcaaataaactgggatatgagaatttctgcactgaggcacccttcttaccttgacatgtcacggtgacgtcagtgggaagagttgctgtgaggtccttatacagcaatctagcacagaacgggaaggactgaccccctggatccagtttgtaagtaaatgacagcaagttacacagtgggtttctctgcaagggcccagtcaggagggctgcaaagtcactctaagaggggtgaggaacaaaacgaagtagaggatgactgcagttccaaaggtggtgtttactgacccttcaattacgtcaaccaaaaagaggcccatcgattacatttcagagaaataaatgagggacagaaaaaggtctgaaaaaaggactaatgaaaaagatgcctaagataactaagagtcactggcagcctggaaaggcctataggcctaaatggccaggggtacagcttcgcaagagactgtttctgcagaaacttcactgacgttacacggctaagatgcttcatgactgcatccacatttcaatttaagttaaatctacagctgagagcttcagagttactccaaatccatagagggggaaatgctaagcttgtaggaggcacttacagcctatttgcattaatttcctatctacttttttcacccaaccttagctcaactgcaacccaaaaaggtaggctagagtttaggggaagatggacagcattgttccatggcactgcagaaacctttcttctctaatgagatctatacccaaggttcagcaaggcactcggtatggtacatagtaggcacgccataaatccctgatggatcaaaagtatagcaactgcactctgtacaatcttaggataaaagcttgaagaccaccattcaggggtgcataatcctttaaccagtacccaggcttcaacgccatccagagtttcaaaagaaaagagggtgggatagtgcttttatataaataagaaacaagcatcggaaaggtaacggtcaaacttctaactcacagttaggaaacactgaaaatacaaaaaacatcccccttttaagttgatcttgggcccacggatgaggcatataacatcccagagagatacctgaagccggtctgcctggtacttcctcccagagtaagcattcaggtactcgcagagactgaacaggaagtgctggatgttggtctgtaaatattttgcagctatctcttccaggggaatgaagactgggactgaatggtgatgtatccggagtggtttctgtatgacaaggtccacaaaataggaatccaataggttcccctcaaaagcagtactgatgcagacacaaactcctcggctggtcagtttaccactgaggcctgaggcaaacaagaagacacctcaatagacagcaggccaaggtgatgtcttactcatctgtgcctccagtagcttccacagtgcctagaatatgtatactttgtacacaaatgtttgttcaatgagtatcataggctcattcttccccttggctccggctcactttgagactgagttgttaaaaccatggaagaatggtaaaaatgaaaaaacaacctaaatgtcaaactattgagaaatttttttttttttttttttgagatagggtttcactctgtcacccaggctggagtgcggtggcacgatctcagctcactgcaacctcaacttcctgggcttaaatgatcctcccatctcagcctcccaaacagctgggaccacaagcgcatgccacctcacctggctcatttttaaatttttagtagagatgaggtcttgctatgttgcccaggctggtctcgaactcctggactcaagtaatcctgcctcagcctcccaaagtgatgggattacaggcataagcaaggccaaaaatttaatttatagctattctttatttctgagtgtgaagtaatttgtcagagtccccagttcttcccacaactatcttgtggcatagatgggagaataaatccctatttacggtgaaacggagacttggaaagttcaaactatttcactagtggcagaaaacaagccagcagtaaagacagttctagtacaaggtctggcacatgacgaactgttaagatgagtggaataagccagccaccaactgagctgctgtacaaaggggccagtcaatcttgtaggtgaagataggcctacaaatagcacgtcagctgtgtgtgtgtctgtgtgtgtgtgtgtgtgagtgatgagggcagagggtgtaaaatactataaattatgaaataattccaggactgataacacatctagcaaactaactcactagaggcagacccagactaaattaggttaaaaaaacaaacaaaacctgtaaaatgatatgcctgcagaatggctttcacattttccaatttctcttccaatgcttcttgctcattgatctccactgtttggttgggttctacattggcaatacatgctttcacctgcaagatatgcagcaaatcaatcttggtacaaagaggtacactacaacatccccgccctcccccaactggatgaaagctaaatacaaggcacatgatataatacatcaagaaatgctacagtggccggtcagttattgctatgaattcactgcagaggaagaatctcatgggtcacaatgccaggaatcagaagtggagattgtacaggtctgaagaacaattcgatttttgatgggaatggacaggactgagagagcagcaagaaaaggttgtgtggaaagtctaggctaagcacagggtggacacaacaggtggctgtgaagaggcaaggctgggtaagttgtgcttggacagtgtggggtttcaagtgccagggctccaaggcttacgctgctagctatggcccagcagaaggtaccaggctgacccgccctctgagaacaactatgcaagctggataaaataccaaaaagaaacaagcaagcaaagagagcaaatggtttgaaggcattccagaaggatccaaatagccaggattggagagtactgacaaatgctctgagctggcttccctgcagcctctggcctcagagcatttccttattcatatgcaaggcacactgggccacatagaaaggcataaactagactccgcagcagtctcatccggaacaaacactggacattaatggtatcaaagcagactttctacgggccaagattccatagaaacaggaactcaacgttctgcttgcaatcttccctcccggcatttgctaattcctaagctgcacaggtgtgactggggactgagaaaccaaacggaaagaagctgctaaaggggaaaaagccaagcagagattttgctagaacaaaatgtggatttcagggcctgccagggaacaggagccttaatagacccatctccaacacactcccaaactttcaactgaaggtcctaaaaaaagctaagccctaggagtaagggaaaccggaaatagaccacctcaactgaataaaggtgatgtgcccatacacgatctacttgccagaaaaacactaaaatttcctctggaggaagataacatactcagaacccatatatttttccttctttctttcttttttccagacagagttttgctgttacccaggctggagtgcaatggcacaatctcggctcactgcaacctccgcctcccgggttcaagccattctcctccctcagcctcccgagtagctgggattacaggtgtgcgccaccacgcctcgctaatttttgtatttttagtagagacagggtttcaccatgttggccaggctggtcttgaactcctgacgttagatgatccacccgccttggcctcccaaagtgctgggattacaggcgtgagccacagcacctgacctccgtatattttttcatacacaatactcatcattgaattaaaaaaaaaaaaaaaaaaaaaactacaggcataccaggaaagagaaacagatgactgaaagccaagaggaaaaagaagacaacagaacagatgccaagggattc

SEQ ID NO: 95094 - DNA, 121568 bp, Homo sapiens
  misc_feature (1)...(121568): n = A,T,C or G
aagggcatccatggtggggaaaggtacgcaaggatgctgcgtggccattgggtggcgtgtggtgtgtttgcccagcacccttgctttggtgaacagctttgccctgcttcacagggtgctggcaggatctgttcatcccagtgccacctcttgaacccacttacaggagtgggcatgtaatctgtgctatcccactggccacagaacctggttcaggttggacttgtgaccaacgccagaacaactgaagtagtccctggaacttttctgctagggatggccccttgagagagggtgacattgaagaaaaacaaaaacagaaacaaaaaccagggcaattgtgtgtctgaggatcagggttgggagtgaggggttgttaaaagacccagagctttatgttgtggaggcattaggggatttcctgaagtcctccttcctttcttgaaggaaaagaaaatgatattcttccactgggattctaagctggaagcatgtgagcctgaggctgctggtcaccatcttccaaggctgtgtggagtttgtttaaagtaggagggaaagatgccaaaatagtgggaagcagtcgtgagcgatggaaacaggggaagaaagagagagagcagggagagagtgcactctggagctggcatttgaactaggttttcctagtcctaaatccccaactctgggcttcacaattgtctcaattctaaacaacagaatccctctgttcagactaattcaggctggcattctgttactgtaacagagagaatcttgactaatgtgacagccctacctggaaggcgggtagaaggatccccatgtgttacagatgaagaacctacggtgatgaggtccaggacatagttctcctcgtaggtgtcacatggaggggatattaagatgactgcagtggtgagtcactgtgggggtggaagtcgctgagcagctggtaggtgagccaggtctggaagtcaggagggaggatggaaggtcacccactgtgccaaaggcagatgggatggtttgagaagagcatggatggagaagacacgtctctgtcaggatgttgggggcaagggtagacctactgccacttttctcttttgagtcaggagtgtaggagctaagccttccgctggagaccctgggtagaggatgttagaggagcatgtgacctgtgagggggctgggagggcccctgtggtagtcactggtgctaactctatctagttctccccactttgaggcccatggtagcatttacttcctggtccttgtaagtgaatggagctgtgtgactgcctatagtgacaagtgccttttgtcaatgggacaccctctggtactctccttgagatagtggcttttctgtcgaccagggtccctgagtattcaatgagcagagccccctacctctacccctctgcaaacctgcgatagacatgtgacacgggcaagagaaggaactttcgcggttcgttggtaatctactgaagaaatgtaatgtacagttggactatgctctattttttttattgtggtaaaatagacataacatgaaatttatcattttaacctttttttttttgagacggagtctcactctgttgcccaggctggagtgcagtggcgcaatctcggctcactgcaagctccacctcctgggttcaagtgattctcctgcttcagcctccccagtagctgggactacaggcgcctgcctccatgcccagctaatttttgtatttttagtagagatggggtttcaccatgttggccaggatggtctccatctcttgaccttgtgatccacctgccttggcctcccaaagtgctgggattacaggtgtgagccaccgcgcccggccttttttttttttttttgaaatggagtttcactcttgttgcccaggctgccgtgcagtggcatgatctcggctcactaaaatgttcgcctcctgggttcaagcgattttcctgcctcagcctcctgagtagctaggattacaggggccttccaccacacctggctaatttttgtatttttagtagagacggggtttcaccaggttggccaggctggtcttgaactcctgacctcaggtgatccacctgactcagcctcccaaagtgctggaattaaaggtgtgagccatcacacccggaccttttaatctttttttttgagacagagtctcgctctgtcgcccaggctggagtgcagtggcatgatctcggctcactgcaacctctgcctcccaggttcaggcgattctcctgcctcagcctcccaagtagctgggactacaggcgcccgccaccacgcccggctttttttttgtatttttagtagagacggggtttcaccgtgttagccaggatggtctcgatctcctgacctcgtgatccatctgccttggcctcccaaagtgttaggattacaggagtgagccactgcgcccggcctaatcatttttaagtgtatagttcagtgtcataagtacaaccaccaccgccatccatctccagaactttttcatcttcccaaactgaaactctatccccgttaaataccaagtccccattccccctccccgcagcccctggcacccaccattccacttctgtctctatgagtctgactactccaggaccctcatatgagtggaatcctacagtatttatgcatttgtgtctgcctcatttcatttagcatagtatcctcaaggttcatgcatgttgttaacaggtgtcaggactccctcctttttaaggctggatcatcttctattgtgtggatagactgcattttgcttattcattcatcagctgataacatcaggttgcctccacttttggctattgtgaataatgctgctataaacattggtgtacagatatctactccaatctctgcttttggccgggcatggtggctcacgcctgtaatcccagcactttgggaggctgaggcaggtggatcacctgaggtcaggagttcaagaccagcctggccaccatggtgaaaccccgtctctactaaaaattaaaaaattagccaggcatggtggtgggcacctgtaatcccagctatttgggaggctgacacaggagaatcacttgaacccaggaggcacaggttgcagtgagccgagatcacgccactgcactctagcctggacaataagagggaaactccatctcaaaagcaaaacaaaagaaaacaacacaacaaaaaacaaacaaaaaaatttctgctttcaattattttgactgtacaccggaagtggaactgctgggttatatggtaattctatgtttaattttttttgaggtactaccatactgttttccatagaaactttgtggttttgagtcactgagatttggagttgtttgttactgcaggacaacctagcctgtcctgatactgccacataccctagataatctaggatcagccaggattctgatgaggccacagtgcggcagacacaagtgaggggtgtagaagccgagaggctaaaccaacctgagttaacccagtatgaggtgcagtgatgagggttagctagcacagatatgcctcctcttgggaccaaagacattaaggtcagggtctggaaccaaccctgtagccaaacggttgtttcttaacagacataaaccccctaacacagtcaccttggacctcttgaccccagcaacccatacatccaaggttacatactttaccatactaagtgactttggtggctcctaataatgtcatcataaatagccctattgaatagaaatttacatttgctcatcatggccctgagaatttcagcttttttttttttttttttttttgagacaaagtcttgctgtgttacccaggctggagtgcagtagcacgatatcagctcactgcaacttccgccacccaggttcaagcgattctcctgcctcagcctcccgagtaactgggtttacaagcatgcgccatgacacccagctaattttgtattttaagtagagacggggtttcaccatgttagccaggctggtcttgaactcctgacctcaagtgatcctcccgcctcggcctcccaaagtgctggggttacaggcgtgagccactgcacccactgaatttcagcttcttaagagcaactatgtttcaaaagtgtggtgtgggctgggcacgatggctcatgcctgtcatcccaacaccttgggagcctgagataggagcatcacctgagcccaggagttcaagaccagcctgatcaacatagagaggcccctatctctacaaataataataataaattagccaggcatggtggtgtgcatctatagtcccagatactcagaaggctgaggcaggaggattggttgagcccagaatgtcgaggctacagtgagccatgatcactccactgcactccagtctgggcaacagagcgagactgtgtctcaataaaagaaaaaaaaaaaagatgtgatgtggggtgatttcagagccggatgaacctggctttgaatcctgactctgccacttcccaactgtatggctttgactaagactgagcctcagtttcttcatctgtagcgtgaggagagtacaagccatatcacagggctagtgaagactagagaaaataccatgtctggtgcctggcacatagtagacactcagtaaacagtcgctgctgtttggggccgtgttatatgtaagcccttgatgaaggcagaggtatctcagtcatccttctataaacggtcttctcctttgccaagctgggtgcgccatttagagtgttcacggatgcccctcctgatgtagaaagcgaacagcccaggagggtcacatgttaattccaccaaggtttactgagaatctcctagcaccaagtgctgggctacagggatgacagacgcggcccctgtcctcacagagcactgggagtctctgggccggtggggaccatggacagcagggcctatcatcagtagggcggggtggccacttgagtgagggtgacactgaaaacggccagaactatggcctagaagctggtctcagatatcgaggctcagggtgggggttggggagacggagggacctggaagcattggagaacctcccgaaggaaaaccttcccgtctgtatgaaaggtcagctcccggtcccagagaacttggcaactcggttctgtgacgctaaaagggtggcgttgggggggcgggtgctgggctgcatggggagaagggaaaagtaggatccgcttcactgtgaagtgagtcccaccaccaactccagcaatccctgcccacaagtaggatggcgggtccctgggaagggagcacgccatgtcctgtgccagtcagggagctcagggcactgtgatatagctgaagtgctgagtagaattcggggtgcagagctgcgggtggctggtggggtgctggggcgcgcaaggaggctggaggcgggggtgggggggtgcccagccccaagtcctacagcggctgctggaggagtgagatgagcacayagtgagtggctgtgctggtggaattagacagaggtgccccaagtcaggaacctagagccctgagcgctccatggggaaggagaacagcccccacggtgaaggggtgagggcggtgtgtaggcacacacagaatcttccagctggaagagaccttcaatgtcatttcattcaacctcccacctcatgaaatctttcagtcttccagtgcccaactgaggacacccaactctacttggacacctcaaggtacggggaactcactcccttcaaggcagctcatctcagagaggctttggagcctgcgggacggccaggaggagcctggcgctccgaccttggccctgtagagcagagtggcctctactccgcggcggcacctggctgggggttgcggcgcggttgggccagcgctgctgtccccagccccagtgctgaggcaggcagagcgcagtgggctctggcggaggtcgggagaactgcagggcgaaggccgccgggggctccgcgggctgcggggggaggcacttgacaccggcccggggagaggaggggccgctgtccctgcggccagtgctggatgcggggacccagcgcagaagcagcgccaggtagcggggcgcccagcgtggggagggctgcggcgaggcccggagctcggctacgactcgaggggctctgtagtggccgggagcgcggccgaggcggggcgcccggggcccggcccccggtctgggcggtgcggggtccagacctccgccaagcggcgtgcggggaccccggcggggccgcagaggccgggaagtcgcgccgagggcgctaggaccnnnnnnnnnnnnnnnnnnnnnnnnnnnnnnnnnnnnnnnnnnnnnnnnnnnnnnnnnnnnnnnnnnnnnnnnnnnnnnnnnnnnnnnnnnnnnnnnnnnnnnnnnnnnnnnnnnnnnnnnnnnnnnnnnnnnnnnnnnnnnnnnnnnnnnnnnnnnnnnnnnnnnnnnnnnnnnnnnnnnnnnnnnnnnnnnnnnnnnnnnnnnnnnnnnnnnnnnnnnnnnnnnnnnnnnnnnnnnnnnnnnnnnnnnnnnnnnnnnnnnnnnnnnnnnnnnnnnnnnnnnnnnnnnnnnnnnnnnnnnnnnnnnnnnnnnnnnnnnnnnnnnnnnnnnnnnnnnnnnnnnnnnnnnnnnnnnnnnnnnnnnnnnnnnnnnnnnnnnnnnnnnnnnnnnnnnnnnnnnnnnnnnnnnnnnnnnnnnnnnnnnnnnnnnnnnnnnnnnnnnnnnnnnnnnnnnnnnnnnnnnnnnnnnnnnnnnnnnnnnnnnnnnnnnnnnnnnnnnnnnnnnnnnnnnnnnnnnnnnnnnnnnnnnnnnnnnnnnnnnnnnnnnnnnnnnnnnnnnnnnnnnnnnnnnnnnnnnnnnnnnnnnnnnnnnnnnnnnnnnnnnnnnnnnnnnnnnnnnnnnnnnnnnnnnnnnnnnnnnnnnnnnnnnnnnnnnnnnnnnnnnnnnnnnnnnnnnnnnnnnnnnnnnnnnnnnnnnnnnnnnnnnnnnnnnnnnnnnnnnnnnnnnnnnnnnnnnnnnnnnnnnnnnnnnnnnnnnnnnnnnnnnnnnnnnnnnnnnnnnnnnnnnnnnnnnnnnnnnnnnnnnnnnnnnnnnnnnnnnnnnnnnnnnnnnnnnnnnnnnnnnnnnnnnnnnnnnnnnnnnnnnnnnnnnnnnnnnnnnnnnnnnnnnnnnnnnnnnnnnnnnnnnnnnnnnnnnnnnnnnnnnnnnnnnnnnnnnnnnnnnnnnnnnnnnnnnnnnnnnnnnnnnnnnnnnnnnnnnnnnnnnnnnnnnnnnnnnnnnnnnnnnnnnnnnnnnnnnnnnnnnnnnnnnnnnnnnnnnnnnnnnnnnnnnnnnnnnnnnnnnnnnnnnnnnnnnnnnnnnnnnnnnnnnnnnnnnnnnnnnnnnnnnnnnnnnnnnnnnnnnnnnnnnnnnnnnnnnnnnnnnnnnnnnnnnnnnnnnnnnnnnnnnnnnnnnnnnnnnnnnnnnnnnnnnnnnnnnnnnnnnnnnnnnnnnnnnnnnnnnnnnnnnnnnnnnnnnnnnnnnnnnnnnnnnnnnnnnnnnnnnnnnnnnnnnnnnncgcccgccttgggggcacaccttcccccggagtgcccgcggcacggagaggggtggtcgtgcccggctcctccctgtccccaccgcgggccgtgggtgcccgggcggccgcggtggcggcgccgcaatgtgggggcggggcgggggcgggcgaggatcccgggcccgggcccgggccgcgggggccggaaaacgcgggggtggaagtagcggggccgggaccgggagcggcgcagggggggtacgcccggggtcgcccctccagcacccccgcgcacactcccacgcacgcggacacactcacgcacacgcaccccgccgggccggtgcagacgtgtccttgaaagcttcgcatctgcacagtgaaggacgaggcctcgccgcggctgcggagcggggtcttcggccccacgtccccgcaccccgggagacctcgagcttcggagccgcaggcggcggctgtccgtgtcccgccctcaccccagttcccctcccccaggccgccctgccttccctccccttcggcgcggaccgggctggcgcgggtccagggcccgcccctggcctcccccagcccctcatcgctggggcccgcggccctggggctgccaaactgcttttcgctttcctgaagcctcccttcttgggggcaccctctcccaccccagcgcccctctgccatttctccccctctcctcatcccctccgtcctggcaccctctctccgctgcacggccagttgaggaggtgttggcgccctgggcggggagcagtgccctctggttcccaggggctgcctcccccggctcctgaggggagccccctgcggctgcaccttgacccaacatggcgtctggcacccagcagggcagctctggcctgcggcaggcgggagggtgggcagggccgagccccagggccgcgcagctaccccccctccaaaccagcggggacagaagccttggggagaagcgctgtccgccctgtgacccaacttgcccctcactgccgtgcccagagactgccatcagcatccctgagggcctgctcagtcttcatgtttcaccctaggctgccagcggctgaaccgcctcctgggcgggcggctacgaagggatcctgggatcaggtgctgctccagtgtcgcctcctccctcgcgggcagatgtgacagctgcagccaggggagctattcgccttgctattgcctgggtgttaggactggcctgtgggatttggggggccaggcatcccggggaccctctttggttggctagcaggggccatctccaggtagttttctgagctgcctgcctttggagagttgggttgtagggagttcctgctgggtttctggggcaaaatggtccccctctgcctccaggttctaccgaggccctgcttgggctgtgacaggtggctctgtcaaggtgggagtctgtgtgtgcacatgtgctggctccaggcgagggaccaggctggcctgtgcagcagctctggcacctgcctgcctccctggtgggtccccctcctctgtgcagctcctccccagataagcagctgcggattcaggccgaccaaacttccctcgttaccccacccaggcaccagtgccttccataggagactgaccctaagaaaggtgaattccttctagactcaaggagtggactggtccacagggctgccctctgagtccttcctggagaagcctaggaaaggacgccagcagccatctgtcagggtgtctgcggacaggattcctctgtggggtgggggttggactagagccggaaggtccattccagctttgacattctatggctctgattctagtggtggaatttcaggcctagcaatggggacagggtggtctgtttttcggcacatggcagtaataggggaaggcttccaaggagaaggagatatgagagagatcagggcgcccagcgagttgggccttgggaaggagaggcagtgtgaggagggtccctgcaagagacgggttggtcacgtccgactctgcagagggtgtaaaaagtacagcctcctttaagcctcggcacgtgtgtatcctgtaggtttgtgtataaatccctgtgtgtggataatttctgaggtttccttttcaagtccaattcacagtaagctcctcagtcccttatggatgttttactatcgctttcacacccacctctgccagtggttctcaaaaagctaggaagacaggacaaacggtaaaatccttgtccagggtcaccggcaggaagaagtggagccaggcctgcactcgggggaagatgccccatgctatacctcttacctgggctgctgcatgtgtctgtccccgctctcagtttgtgatctccaggaaacaggggccttgcctccctgggtccccattggacaagcggtgaggcctccgagggtgtctgctgagcgaggggagcgcactgccctccagtcctctccccgaggcagcgaggcaggttagtgctgggctcccttccccctgctgctgtgcgccgctgcccagcggccactgcctacttacaggccagctcctcagggtcacacctccctgaaagacccaagttctttcccagcaagagccagactcccccaaggcttctctttttgggatccaggtagaaagaggactctaatgggtgagttaaaacagaccaccctctccccatctttgggcccgaaatgtcagcattagaacccaaaccttagaattgcagtctgaaagaggagtttaagctctgagagctcttagtgctgggtacgggactgtttgtgggaggtggtgcccagttcttcccagggttgtccatgctacccagagcctgaggcctggagggccattcacgtgccagtcacatgcctctcccwgggtacttcctgctgcctccaacttgctggcctggggtcctggacttggtgctcgtatcctccccaccccgtgccccactgggagttgagtgtgtctctggcctccagcaggtagggccagagcatctaccccaatgccattccccatgctgcggccctcggggaatagcttctacttttgtttgaatattagtatgtgagcagagagcccgtcagaagcccacctggcctgaggctgggtttctgcagggactttgctgttcctgagcagggctttaatggtctactaaaggtgccagatccctttccactttaattttgagggctcattttcartcatttctctctgacgatttttccctaagaacatgaccaaatctgagatccatgaagtgtcagcctgagatttatgtctgtatccgagcctgcctccacttggctaagtgtgtgggcaagacgaggttcagtgcacatgtgtctgtgcatgatgtgtgtgtacgtggtgtgccgccacctgtggatgggtaggacttgcttccacatgagccagtgtcaaggcagcttgaggccctcgagtcacagggagctgcactctgacacctcccagcggcaggaacttgggcaacaactcgattccctgggcctcagtttcctcacctgtaacatgggagtgtgcgtggattctgcttacaggtggttgtgaggatggagtgagatcatgtgcgttacagccttagaggagcgggagccctcctgttagctgtgtctgttttcatcatttgggtggctcacgtggactagcactgcaggaagtgctctaagaagcctcgtccaccttcctgtgtcttttgcagaatcttggtcagatgaggaaagtgccgattctgattaaaaatcctgggaggtgggaggcttctcagcgacacttagcaatctgttgagttgaacaaatctcgtgtcaacaggttgttttgcttccacctgaaatccctcccgctgtagtttcagctcgttattctcatcctgtcttgagtgcagcagcactttcccaccgtattcgcttccattttccagagatgtgctgagcatttcctgtaagccatgccctgtgctggctttgaggggacacggtgtgtttaggatgcgcccagctaacgaagaactgcagagtgggactggggtcactggagagggagaaataaagtgctcaaaggagagtgaggtcacaaccaactaaggtcatcagggaaggcttcttgaaggaggtggcatctcagaagcgccccagagcacagaagtggggcttcaggggcaggacatcattgtgggtggctgtagtgcccgggaggtggactggggcctgggttgtgctggaggccaggctgaggccctgccttggtttggggaggagatccctgcactccggaactcctctgtggcccacggaggatcgctctgaactgcctcagcgtggcggccagtgggggtaggggtggagagaggacagcagggagggaggggaaggggccaaatgagctcatttggtgtcggatcctgattctttctattccatagaccagagcttaagagctcagacttggagagcaacagaacagggtttaaattacactgaccccagggggttgtgacgattaagggggaggccagggtcaggtctggtctgcgagcgagtgatagcagtcatggttgaggatgtggcaggtggagaagggtcccttttctggcctcccagaggtctccatgtccccccttgcccactccatcaggctgaggcgccccagcatccagaacattcctgcaaggggctgccagtgccagggaaatgggggtgaagacgtcaggttcctgtctctgcagcctgaccctgtcccccaacacacacgctgggcagaaccgagccaccaacccagaggggaggtgccctgcagacggcccaggcccccaggcatgagtgcaggtgcctggcagccccctgcaagaacagctggtgggcagggccttctgggccaaatctcccttgctgatcacatcacaggccaccaacctgtctggaggacagcaagggtgcttggtgggcagtggaggtgggggtaagggaggtgcagacgcctggggctttcctagctaaatcccagtatggagtggtttgtttttttttttcagcagcagctctatgttgcctactcctgtcctactgtggtcctctctgacccttaaaggctgcccagccttatttagatatatgaccaggttcctattttctctttcctgtggtcacggccctgctcaccaccatccctattgatctttcctctctgcttctgtttcaaatgtcaaggtcatttttaattctgagccagttattagctgccccgtctgagtgcacagaggggacggaggaccatctcttatagccagtaaccggagagctggaacttgggtctcctgactcctagtctaatgctcttcttactataatgaaaggggaggggggctcagtgcagatgttcgagatctgatagatcagctgggtcatgggttccagtgatccttccttgaaaaggtaaaaagatgcttagagattatggggtgtgggttagatttgcatctcactaagctgttgagtgtgggctgtgtcctggggaatacttgggaacggccatggtctgggggcaggaggccttcggagtgtccctcccccgccactccctrgaggaccccgggagacacaggcgagttcgcccctgcccctgccaagccagtgggattccccagcaccccagtgagcagaacctgtttggaaagaggcttctggaaggcctgcacgattacttgtataggttcccgaagtgataaataaatgcatgggtaaaggggaatccacttagattccctaaaagcctttgaaacaaggtggtaggcgagtctgttctgatgtgttagatccccatgcagtagtgttgtggttaaaaaaaaaaagttcatagtgtaatctcagttttgtgaaattctttaaaatcgatacaaatatacacatgtttaggtttgcacatgcatggaaaagttgttctggaaagatacacacaaacctgtcaacaagtttttgctttttaactttgtacactttcgttttctttgaaaaaatgtaaatgaacttgagttactttcttaatgacaacaacaaaaataaaactacactttttaaaagcctgtggatgagaaagtagaaaaaagaattaagtcacctaaggctgagggatggactcttttttataatggataagaaactggtttagagactgacagcaaggggtaagcttactcaggtacgtgtcttttccggaaaggttgcagggagaaatatcgcagatattaaggcctctgagcaaaggcctaggctggtagggattaggtgagagcagaaaataggccgctgactgcatgcaccctggcccacgccagggacaggggacaaagttagctttataggatggcgacttgaaactcatttctgacccaaagtggagaacaaatcactgaggatcttcccccaaaagcatcagtctgatgggctgttgtggcccaaatggttcctggggaactggaggtataactggggcccggcccgggtatggagctcaggtgacccagccctggcatagtgagagcctcttgggaggccacacccaagggagacaaagtggggcttcaggaggccccacgaaggggtagaaggggtgtctaggaacttgcttggcacgtgggttcaactctgatctaggggtccctgagcaggtggtgatcacccagatgatggggtggagaggtgaggtgggggcaaatacaagttcctctgtctgcagtcgtcttgctaccccaggaagctcagggctggttgcttagcaacagcacttaccaccctcttccaccttaccctcccgcaccccacccatgggtgcctcttggggcttcccttcccccgaggctgcccctgttcaataggacatgggaagggtctgtgcacttttttgaccctgcccctggaataaggcaggaacagacataaaaggacctatgacttggaggcaagcacagaactggcccctctacaaaccagctgtttaatccaaggctggtaggggacagatgtgcagggcaaaaaaggcgttcgggagtcaggccgacctggaggactgtctcagccccatttgtgctcagttgctgctggccccaaaccacctggagctgcaggtttttcatctgtaaatcggggataagaatagcagtctcatcttacaggggttgcctgaatgacgtgcaatattttgtgaaacagctagcactatgcctggcacagagaaggtgctcaggaggcatgagctgcttttctttacgtgggggttgttccagggctgcctggttagggtgacccccacaaagccctgctgctctgtaaggccctgctgctctgtaagaccctgcaagtggccaggtgcagtggctcacgcctgtaatcccagcgctttgggaggccgaggcgggtggatcatctgaggtgaggagttcgagaccagcctggccaacatggtgaaaccacctctctactaaaaatacaaaaatttagctgggtgtgatggtgcacgcctgtaatcccagctactccggaggctgaggcaggagaatcacytgaacccgggaggyggaggttgcagtgagccgagatcgcgccactgcactccagcctgggcgacagagtgagacttcgtctcaaaagaaaaaaaaaaaaaagacctgcaagtgtggcctgtcctccccatggcccctcacggtgaggggaagagataatcaagttgagaatgacccccaagcccatggtggactctgggctgggagtcaggggccacaggggagtggcagggatagagaaagatgtctctgtcctccttagcttccgttatctgacccaggtccctttttccagctgccaataagttgtccctttttctcttagcctttctgcacctccacttcttcctgtgaagccaggatttgcctgtaccttttttgatctcttcagagtcccctgtccatgtggggacccagtagcctgctcaaggcctgggccctctttccctccctgcccactggtctctttggagctaagcggagagtggcctttgctgggttctggctctgccccacggcctggaggcaggggagggtctagaccacagcccggcctggcagctggcacgcagcaagggctcctaatggttttattaccagcaacaatgtggtgcttgttgccatccacgcacaggctggtggttcccagcccaactggtggtggcctgagggccctgcctggtactggaagctcagctgggaagcccagtggggctgggcagtcagtcacctctgcgttttcttctgtcaacaccctgccagcagcctggaatcagagggagccagggcacggcatggcgagatgctggcccccgagttggcaggcctggcagcacttgagttttctttccagaggtccctgcctcagatccacaaatgatgttcatccattcatctaagagacctactgtgtgccagacacaggctgcatagatgaagggggtcacactcatctcaatgaccctgcagcttaggtggggtctggcagggcggaaggacccctggcacaccatgtccagggattaccagggctcagagaaggaagtcggattcagggggagagaagatctggaagggctttctaaaggaggtgacgcttgagctgagtctcgaagcggagggagcagttagctaggtggacgacggcactttctggccccatgtggctgcagtgtagggaacgatgggatacgaagccaggggcctgggccgggggacatggaaggcgggatgttatgaacggacgttgggcttgggatttatatttgagaaggatcattctagggcatcgaggacgagagctcgggcaatagggtttaggggcagggagcccgggtggaaggctggcacagaagtccggggcagcaatgtgggcctggacagggtgtgcgtggtgtgacatttaggaagtgcagtcagtaggaacaggcgggataaaagcaatgaggggagttggggtggctgtctggtttctagctcagccaactgtgtgggyggggatgcccttcatggagggggcatgggttggggggagtcggagagagcaggaggtgcctcccacatggagctgggttgtagctggggcttgagggcgggtgggatttccccagggggaggctgagccaggccaggcttgcagaaggaggctggagcctgagtcataaggcctggaggcggggtgccttgtgcgatggatgagaaaggcaggtgcatttcagtctgtaactggtacgacccctgcagatgtttgaaggaagattttgaggaaggtgctcgcacccttgcattgggaatgctgatgagttagcgcctctacttcacagtgatttccccaaaagatgagctgcaaggcctagaccctggccctccacccaggacctgcggcgagcatcatcaccgtctgagaatctttgggtgggctggaagttgatgtcaagctgtccagcctttccgtcactctccattcagaggcaggtctgcggagagagataggagggacaagctggggacagcatttttggaaagcaaacagaaaagaagcaaaaactgttcctctaaaatagaaaggaggcttatgtgtgttatgtgaaggataatgtggaaggctatttccaaagaatttctcaaaaaatgacgtgagccatgtcagcatcattgaatttagatagaggccaggagcagtgtggcatcgtgctggggccaccaggcyggggactggacagatgatggtttcacctcacccctgccacctccttgctgcgtgtcattggaagatcactcaacctttcttaggctcagttttaccatctgtaaaatggacataacttcacaggctggtgttgtttgttttgagcattgcttcttggamtaaacctggatattttttccttccctccctcgcttctgcacttcctctggttctttgcctcccaagaagcctgtttcctcctgttccctccaaaactccaagttttgagttcccccttcctgggaaggtccattcgtcatgttctattgactctcttgttcccaattattccctgcaaacctggttcacccagtgtatttgaagagcatctactgagctaaatgggagttattgggggtcagttcctgttttctttttaataaggggagggagggtctgtgcagagctgtccgggagagcagagggcatgggggacaggggggatgttgcaggacccagtgggaccacagctgggaccttgccctgtagctggctcagtgtgccaggggataggggcacagagccctggtgggtctgggagatgagcttgggaaggacttggcctggacatgggctaggctgccctgctttccgagccagacctcaggagatggcagagagggccgcttcctctgtgagggccgtacatgatggcccttgggctgtatggtggccttgtgacatgcagccacacccctggggagacctttgaagcatctctgcattctggaggatctgctgggaagatggcttcgcagcggggctcttgttgatgctgccaagaaggccgggtgggagtcgggctgtctctggctgggggtggggtgggggctgcggtccatccgagtgtggaaatccacgtttctctggtttgtgcagacctgtgcaagcagccatgctgcaggactggccccctggaagtggggcatacatgaactcagggtgtggcgttgtaatcaaatgaaatgtacagcataattaatctggcatacccttaatgatatgcataattgtgctgcatggtaattaggtgtaaatggtaagcagttcacataaatgtttttgtaattggtattaattttgcagaggcaaaccaagtttatgtggtttttctcttcttgctctgttagttttctagtacaggcatttccaagcttttggaggaattctattgcaaatgtttgtttatagggcaatgttttgtgttttctctcagaacaatgttatgaatggttatgaggttcccaagctggtttccaaatgcctctttggcccatacagtaggtgaaatgtgcaacgcgtgtgcctgtgtcggaaggcccgcccagcatcctctggctccaggtgccccagcgtgtgcagcatgaggggggctgtgtgcgtgtgtgaacctgtgcgcctgggtcatctctgcatttgtctaggtatatctctgtgtgtgcatctatgtgtgtttgtatctgtgtgtctgtgtgtgtgtgtgtgtgtgtgtgtgtgtgtgtgtgtggggtctgcatgactgtgagagactcctgaggccacagtggcaggtagacattctctggtaaatacattccccattctagtggcacggggcctgggctggagacttaggggcatcagctgggagggggagcctggcacagcagccgttcctaggagtgagcacaagccactctgaagtgtggtctgaagccagagtctaggtttcctaagaacatatggcttgcctttctttctgatcaagcacataataatttttaaatgatcatttattgagtacctgccacgtgccaggccctatgttaaacacttgactcagattccctcctatcttaaaatagacttatgaaatagggactctttctcaccccgctttacaacttgggaaactgaggcccgaatctctcagtgacagagccagggtttgaggcagggactgctggaggcagggcccatggttctgagatgtgctgctcrgaaccctgggctcttctccctccctcggccccctccacaaatggtttgtttttgttgggacagacgatgaggagaaaggcggccctgtgggaaatctgagagcagcgagctcccttcctgctgaattggttggggtggtgggggacgagctccaacagccgctcccaagccctgaagaccctttgggggacctcctggttttgacccaagagggagctggtttaggaagtggggttgggggactgtggccatggacggtgtggggagagggtggtcacaggccagacaaggactcagcccccctgattcctgtggttcactgatagcctaggccctcaccaaccccttcaccttggggatctggggcaggtgagcctrcagacccacagcaggtgtatgttctgccctcggagctcctgcaaacagcctttccactgacgcagtgccttgggggctctgccaagcgacccctagaatggggattgtggggggtcgctctaggcaccgcagcactgtgctggggatgttgcagctgcctgggagtgacttcacacagtcctctctgcctccagggtcacccggaacggggttgcgggggacaagctgtgggcgggggggacgggcagcaagatacaacgcatgaactctgacctcgtctctttgagaaatcagacacatctatatacgcatggaacactcaatgacccctgggtgggtggtcgaggagaaggggacggtgttttgggggaggagagatgttgggttgaaggactgggagagaggagctgagtgggccctgtgggagagggtgggagccaggggtgtcattccgggacagcagccgggcctggaatgatgcagctgggagaggtgggggcacggccagagcagtgggcggaggctgcgttgtagccagccctggtgagaccaggccagagcrtatattttaccacgtgtgcaaatctttggcatcaccggatttttaaaaataatagctttaagatataattcacattccatacagttcacccatataagtgtacagttcgatggttttagtacattcacaatcaaytttttaaaattgtcatgaggtgtcataggttttcatagagggagccatgtgtgggcaatccttgctgatagggtggggtgggaggtagagatgccagaggcaggtggacccgctccagggcatctaccaggttattgtgccacagacacaagaggtacaaagggcctggagggaatagggggacgagagaagcccaaggaccaggtacctgctggatgtgaggacccaggggaaaggtgggacctgagttttctccagggtttgggacttaggcagctgaagggaggggaatgttacttccacatagagggaaaaaccagaaaatagagccggctctgaaagaagcatgttctggaagagtaggattttagggactgcaagtcatccagttgggatgaaaataaatagagctggagcccctggcagtaggaggcgtatgttaacttatgcccaggtgtcttagaggaagagcatttagagagaagctgaaggtagaacatgacctttgaggagcacccaccgtgcagaagtgggatcaagactcccggacagccccagagacaaagctgcagaatctgaggctggagacccagaagcaaggagccagatggagtcatggctgggagagaacacacagaaggcagttgctggtgagctccagaagcaggggtctcctttcactccagggcccggctccacaatggcactcaagaaatggctgttgagtgagtgcttgaagcagggagtgattagctggccaggatgttgaattgagctcaagggccatgaggatggaaaaaagccctttggggccrcgggtgactgtatcagtcagggtccattcagaagacagaaaccacatggtgattggaacaaggaaagtttcacataacgaattattaactctaattggattggaataatgaggaattggctagtaagaagtaaaaataactccaaagaatacaaaaataatagatatgagaacagcccctacctctagggttgccacagagtgcccaaggaagaggccccrcagggttgagatccacaccttgatggagagggtgtggcgatggctccctggatggcaacgtctctgtaatgccatgttggcagaacttgctggaaatccaccctctggaatttactggaaatccatctttttgggtcccaaggaaagttgtttgtgggaggtatcttgctggaagcacaccgctgctacgttttcccaggggagtgctgggagaagctcctggctgttgggtactcctgactgacgtgttgctggagccaggtgctggagaagctgtctgcattgcaacagcctggcactcctgcaggagctgggcactggaaagctgcatgctggagaagctgcagcagcacaggagctgggtgctgggaagcttcatatctggcaagaccctgatgctgggaagcgcccatgcagcaagatctggctgctagagaagttgtatacaatgcaggaacccaacaagagcacactgggtctagaaaggaaacccacctcctccttcaatgcctcttcagtgccctccacagttgtgccagctgacaaaggaaaagtagttaaagggcccagctccatcttcacagcacaggcaatgatgggcgaataaactgataactggcacagtttacccctttggctgcacagcttccatttgcacctttctacaacatctgaactcccatacaaaaacaaacaactggatgtctacctatcaagatagttatccttcttatgaaattctcacccttttgcccagagagccccaaccatcattctaccaatccctggctacaataacttctcaaagtcagtcacagtctcactgaatattctgttacctaaagactacattataaagctaactgtcaacaacttgtatagaaaagaatgggaaggagaaaaaaagaagaaaatgrttaccatattgmamacacaccacacacacacacacacacacacacacacacacacacacacacatatatatcaagttaatagaaaatgtgcaaaaccactagaggcctggtttctgcatttgttcacaaggctacacttyacacttgctacctggcttcattgtcttcttatcccattctgtgtttcctccacactcagccagagccttagcaggtcatgcttcttttacttggtggagtaacccaaaccctcattcccaaaggacctgaatccttagttatcccgcttttgttgttgttaccataactttccattcagccttcctttgggcatggacgttcttaagaggtgcctgagagaattcgctgggttccagacacagtcttgcttggctctgtggctgatcagcaatccagttttctccttggtaactaggatcaatcactccagacagtggcataactccttttttccactgtcagttcagtggcgtaaggagttcgagaaagccaagtgggtgtgtgtgtcttctctcccagggaaagcattataatatgtccctggtgggagcactctcccccgaggacgaggtcagcatccccagaaggttttagagttgtggggtggggaaacagggccacgcgcaggggactaagtgatagaggctctggagctggcagctgtggaccatgctgtagagaaggttggaaaagtagagaaacatgcagatgaccgtgggccgcttccgctgtggatgataaaatcagacccatgctggtcactgccagaccccatccaggaccatgtgtctgattctcacatggactctgtgccaccctgtgcccctgactcccaggccgtgggaagcccatctgacccacagcacgtgtgacccctagacagggcttctcctggcttgcagcacttggaaatcggtgctgccttacggaagtctgtgttggctcattttggctcctgagaacaacttcagctccttaacagcatctattttaggtataaatcccccccccgctcacttttggggctgtgtcatggcaaccattagtgtgagcaaagcagtctgactcagactcccatgtggccgccgtagtggcagcaggtttggtgtgatcataagtgctcctgctggtggtgccagtgctggtggtgccagtgctggtggtgccatggcctcgagagtggtgtgagagccacaagccgtcttattgtgactctagagccagataaatcagctttgcagagggcaggactgctggcctgtcaccagtggcttttggtattctatggacagctggtagtttgggtgcaagtaatgtttctgaaagtcagggcaatggaatggtgatggccatctcactggaaaatggcaccaagacccccctccctctccctcctccttatccatccccagtcttatgaccaagagaggttgtgacaggagggggaagagttgacagatagacatctccgtctaggaggtctcctccactttctcctggcccctagctgacccctaccctagcagatgattgggcagggggtgggggtggggcacaagatactctgctgccttctgtcacccacatttgcacctcctcctaagctcaaataggaaatttagccatgggactgttatctgtgggccagggtcaccccagaggcacaaacatcgatcatggcgctggctctgagatgtgtgtttagcatgctcattcatgaccaagaactgccacatttgcgaagggttctgagttacacggacctggatttataatcctgccctggggctttctagctgtgctaccctagagaggtattaaacctctttaagcctccatgtcttctataaaatggggataacaataggacctgcttcataggattgttttgaggattgaggatagtgcatgttccttagcacagtgcttggcacatggtaggtgctcaggaaatagctgcatgaatgaatgagtgaatgaccactgcattgggcagggcattgaatactgtgattagcatgctccagtgccctccttccccgctcccactgcagacaagcctgaccaggagagagagactgactggaaactttgttttctggccagtccgtgcccaaagttaatatagatctgcagcagtcacatgctgattgtgagagagggagtggagagctgtgagcttctgagtggggtggacctggactgtgcctggctccaccccttacccactgtgtgaccttgggcagttttattaatctctccatacctcattattctcatctggaaaatggggataaaaatagtacccacttcaaagggttggggtgaggtgtgaggattaatgagatgttgacattgtaaagctctgctcacggggcctggcatgtcggaggagcttaagtacaagctcctgcctgagcgaaggccacttagaggaactccagggatttcaagaaaggagagaaatctgcgggctggttgaatctgagagtaatcatcgttaagatttattgagtactttctctgtgccaggcgctcttggaagcatttttagggcattccattttaattttcacagcagcgctgtgaggtggaaagttctttctcccactcgacagctgagaaaactgaggcacagtttcgcctcaggccacacagctggtaagaaataaggccagtgttggaaaccccgcagttggcctcccagggagccctggaggggactgagattagcccttaggtcaggagggtgtcaaccacaagtcatagactcataccaaagtagtgaaagctcacagtccccggaagttcagagacgtccctgcctccaggaacagcaagaccaggggcccagacagtgactacaacgctttatccctctgtcttcatctctgagctcttcgttctcaggcaggctcacccacatggcgggaagacagcagctggcagcccctgactcacatcgaccatgttagcatccttccatcgcatcgataaaaaggttccagggaggcctctgattggctctgcctggtcacgtgctcaccacttgcctggggtgagggttgaggtcagcacaggcacaacgaaaaccttttgacaagcgtttcccaccgggaaggaggggaaggcatctaggtagagcagaacaaccagagtccactagaggaaaaggagaatgcaagcagagggagggagaaggacctgctacagaaatggtcagatatttttcagccattcagacagagaacttgagacggagaagaaggggcccttagggtgagaatattgggatcgtgtttggtggagtgaggatttaggtttgtgggccgtgacagttttggttttggaagaggataattatgtgcaagcccttgttgaggagagactgtggggtggcaggggggccagcagtcctcaatctgaagatggagaggaggcttgggtggtcatctcgggggtgctgatgaggctggggttggtgaggaagtgggggcggcagtggggacagtgtggtgcaggggagcagtcctgaggcttcaggagatggtggagatgtagctctttggtctgagaaggggctgagtgagcgggggttggggttacggatgcaggcagcactgacttgcgctgcccatgggctggacgcagcgggaatgatgtgtttggaggattaaacatttcgtgagggtggggggtggagagggaggtaccagtgttgtagctggtgatggaactctgtgtgggtgtgaggagctgatgatggttattctgtgggacgtgatgatttcatagaacaacagaggtggaaaggcctcagctacactcttatttatagagaaggaaatggaggccaaacgcaaccgatggctgcagttgggacgtaagccctttctcccatccccactctctctgtttaaaaattcatttttatttactcacagtagtacatgcatataatttaagaagtcgaatagtactaaaacctcctaacaaaatgcagtgattccttgcctactcctacccttatcctcttctcagaggcaaccgctttcgattctcttggctgtttcttccagcaattttcatctcatatttctgagtaaagtgcatatttttgattcatctatttagacattttccattgatttcctatttagtagatcctcttacatgtccaacctttctgctcttcagccatcctccttaaatattgacagtactcttcttatattttttcaaaaaattgtttgttgttgattgttttgagacaggatctcgatctttgcccaggctggagtgtggtggcacaatcacagctccctgcagcctcgacctcctgggctcgagcgatcctcccacatcagcctctcgagtagctgggactacaggcatgtgccaccacactcggctaattttgtaaatttttgtagagacaggatctccctgtgtcatcagactggtcccaagtgatcctcctgtcttggcctctcagagtgctgggattacaggcatgagccattgtgtccagcctcaaaaatgttttgtgcatttggtagccagaataatggcccccctaagatggccaggtcctaatcccctggacctgtgaatatgtcaccttacatggcaaaagggactttgcagatgtgattaaattaatgacctagagatgaggggattatcctggattatctgggtgggcccagtgtaatcagaagggtcattagaagtgaaagatggaagcagaagagtagtcagagcaggagatgttgatgaggcagagagtactgtgatgggaaaaagactggccatcgctggctttggagttggaaggggaccacgtggcaaggaatgagggcagcctctagatgttgaaaatgtcaaggaaatggattctccttagagtttccagaaaagaatgcagccctgccaacatcttgagtttagcctagtaaggagaatctttttttttttttactactgacttgcagaattgcaagataatttttttttttgagacggagtttcgcttttgttgcccagggtggagtacaatggtgccatctccgctcaccgcaacctccgcctcccaggttcaagtgattctcctgcctcagccttcccgagtagctgggattacaggaatgcaccatcatgcctggctaatttttgtatttttagtagagatggagtttctccatgttggtcaggctggtcttgaacttccgacctcaggtgatccaccctcctcggcctcccaaagtgctgggattacaggtgtgagccaccgcgcccggccgataatgtgttgttttaaggcattaattttgtggtacatacaaaagtaatttgtgtgtacatacatgcatatatacatatatatgtacacacacatatatttgttaaacctacacacagtgtttattttattatttcgataaaactattattcacagctgagccttgtggtgcactgtaatagtttcttttcgtttttttttccctgaagttaataattaccttgtttctcatctgccttatttttttgtacctgttgctaattcctaccacaacttctaatataattttatttttctttaacaatactgttaccttaggacwtctttttctttttttctttttaactgacacataataattgtgcatctctatggggtacaatgtgatgtttcaatacatgcatacattgtgtaatgatcaaaacaggatagttggtatatccatcacctccagcatttatcacttctttgtggtgggcctaccacactttccaatagccatcagtattgctttccacacgggcagtcacagcaggtaaaagatgtttcagttccattttttaagttatctatcctctttcactctgggctagttgctttctaggcacattgtagctgatgctctgtgacttccttttgtggtcatctttggaattcccattactttccggttggaatctctgttttctggctttcgtgtcctcctcatgcttggctcactcccctcattagagcacatcttccaggacacacatctgtccatatcaaaatccattcatggctgggcacagtggctcaygcctctaatcccaggactttgggaggccgaggcgggtggatcacctgaggttaggagtttgagaccagcctggccaacatggcaaaatcccatctctactaaaaatgcaaaaattagccgggcatggcggcgggtgcctgtaatcccagctactcgtgaggctgaggcaagagaattgcttgaacccacaaggcagaggttgtggtgagccgagaatgcgccactgcactccagcctgggctagagagcaagggtccatctcaaaaaaaaaaaaaagaaagaaagaaaaaatctattcagttcctgggtttagatagcagagtatggccacgagcgatacctgtgtagttttgtcaggtaaaaagacagttcgacagcagagggcatggtgatgacggcactcgtgccccagtctcagtgggaaggctggccctctctggctcatgccaggtgactggcatgcggcctcttttccccttcatcctggagcctcccttcccatctctcctgtactggatcttatgcgtattagaggacatcttcctgtccttcctgggaaaggagcgtgaggcctcatatgtctgaagatgtctttactagggcccagcacggtggcttacgcctgtaatcccagcactttgggatgctgaggtgggaggatcacttgagcccaggagttcaagatcagcctgggcaacatagtgagaccccatctctatttaagaaaaaaaaaagaccccgggcgcggtggctcatgcctgtaatcccagcactttgggaggctaaggcgggcggatcaccaggtcaggagctcgagaccatcctggctaacatggtgaaacccygtctctactagaaatacaaaaaattagccgggtgtggtggtgggcacctgtagtaccagctacttgggaggctgaggcaggagaatggcatgaacccgggaggtggaggttgcagtgagccgagatcccaccactgtactccagcctgggcgacagagcaagactcygtctcaaaaaaaaaaaaaaagaaagaaagaaaagaaaagggccaggcgtggtggctcacacctgtaatcctaacactttgggaggccgaggcaggcagatyacgaggtcaggagattgagaccatcctggctaacayggtgaaaccctgtctctactaaaaatagaaaaaaattagtcaggcatggtggtgggcgcctgtagtcccggctacttgggaggctgaggctggagaatggcatgaacccctgaggcagagcttgcagtgagcsgagattgcaccactgcactctagcctgggcgacagagcgagactccatctcaaaaaaaaaaaaaaaaagaaaagaaaaaagaaaatgtctttattttactctcacacttaaatgataatttggctgaaaataattctaattggaagattgtttaagatttggtttattctttaagaattttggctgggcacggtggctcacacctgtaattccagcactttgggaggccaaggtgggtggatcacttgaggtcaggagttcaagaccagcctggccaacatggcgaaagctgtctctactaaaaatacaagaattagccgggagtggtgaygggcgcctgtggtcccagctactcgggaggctgagaaatgagaatcacttgaacccaggaggcggaggttgcagtgagtggakatcatgccacttcactccagcctgggcaacagagaaagactcygtctcagaaaacaaaaacaaacaaaaaaacccaactgatcggaagctctgagaatgatagtggacttgttggttttcaagtctacataggctgacctgaataagtcattttgaccccattttggtactgatgttggtattggcatccttaaacctttcctcttagactcattcgattctccagagaaggaaatggttgtctggctgccagtattcttagagcccaatcggggaatagcctgagagactggacatcagcatttaaaataaccttcccggccggygcggtggctcatgcctgtaatcccagcactttgggaggctgacgtgggcagatcacctgagattgggagttcgagaccagcctgaccaacatggagaaaccccatctctactaaaagtacaaaattagccaggcttggtggtacatgcctgtaatcccagctactygggaggctgaggcaggagaatcgcttgaacccgcgaggcggaggttgcggtgagccgagatcgcggcrttgcactccagcctgggcaacaggagtgaaactccatctcagaaaataaataaataaataaccttcctctccttggtttgatatatcatctttgtcttcagctgtgccaagtgactctgtgcaaagaccccctattttatgccctccagtgactacagataaaccttcaaacttgtagaagagggtctaggaattcactactctcactcagcctctcgtttctcacacaagcatcctcttcagccctagtgccagagtacctggtgctgtcatataagcatctgttgaagactgtgttatatatcagcgttcacacgcctgtctgaaatttggctgtcacaagtctgctttccagattccacaattttgttggtggtattccttctcttgttcagcctaatcttgtgattttatgtcttaaaaaatcttttggccaggtgtggtggctcatgcttggaatcccaacactttgggaggctgaggtgggaggatcctttgaagccatgtgttcaagaccagcctgggcaacatagggagaccctgtttctacaaaaaaaaaaaaaaaagccaggtgtggtggtacatggctgtagtcccacctactcaggaggatgaggtgggaggatcacttgcacttgagcccaggagtttgaggctgcattgagctatgatactgccactgcatccagcctgggtgacagagcaagaacctgctctaaacaaacaaacaaaaaatgtttctattgcattgagtttagaaggtagtgagccttggtatgcatattcaaagctttcagttctttttccacaacagttttatagttgacgcagtggagatggtgatcatatcagctgtgatacgaagatgttttcatggtgggattccttgaaattttttaagtggctgttacaaacattattcatggtcactgtggactctaaaaggaggaaataaaagctgcttttcatggtggtagggttcttggcaagggttttttggtggcagtggtggtggctgtgcagcccttggcccaggtgggaagaacgctttggtatcggaagcagccagggctgtgcggtggaaggaccgatgtggtggacacccgctgctgtgttgggactgtgggcccaggagagcccactccccatggctgggctgcctgaaggaagaatgaagcgtctacgggtaggtgggcaatgctatgtcaaggtctgggaccttggccaccaactggggccccctagagttgtgtagtacatggcccgcccagacacatactggaggattttaggtgatggacaygattttgagggactgctactgacagggctggtccattgagcaacacgaaagggttgacccaggtcagctgcattttctgtgaggacagtttctgcagctcagatgtcagagtcttgggtggaggaaggggaggaggaagagaatcttcctttcctttcctgtctggggtgtctgcccttggggccaatgccctgtgaagttctgcttttccctccagcttccttcctctccagagcttctctgaacctcgccacacccgtggcggcacagatgccctctgggtgtccctaagcctagggcagcatcaagacaaccctcccgccccgcttcctttgtgcctgggtctcccccgactccatttggggtgccctgtccttgtcagccccttgtgtgtccactgtgcctgtggggccgcaacagcttccttggccggtcagagctattaatagaaggggtcctgctctcccatttcattggtggggaaactgagggccggggaagcctccgtcaggagtagatcccacccctgcggactttgggctcaacgttctttccaatcagactctgcccctcttagcttctgaccctttcgaaggtttttgttttagtgtggctggagatgtctgtggtaacaaatggggagtgaggcttgacagggaatcactggctgctaagggctggcagccgagtgcttctgggttggaccagttctcttttgggatcttcagagttgcttctgtggtgtgtgttgggggacgtgaacccaacccctcagaactttagtgtcagagagatctgggttcatgcctctgatgggtcctggccttgttgatcttaccgtcacctgtaaactgggcacggcacagcagctgcccagatgcagagcacgagccaggccctgagtggcatgtggccgatggagctgctctccgctgccgtccaccctctcgggacccgggcagcaaaccttccttaagcccagcactgcgctgtgcctaggggtatggggaatggacgcagtgcacctgggctgcctcagggctcagctgtggggcaggtccgcttcaagcctttctgggttgacctgatggagctcttcctgtcctggccctaagaagctcctcctgccagctccttcctcccactaccccctggggcacagccagggctggggcacccactcccaggcaagaatgcacccctggagaaaggggctaggcctgtaggagagccaagcctgtgctttctcccggtcctggttttccagggagccctgactggagggggatgggaggagaagcccaggagggagggggagctggggaagcagaaccaggaactggaaggggaagggtgtgggtgggcccagatccagcctgcctcccgctctcccttgcctgccaatcccctcctgggccctggcacactcaaggcaggggcttggcggccgcctcctccgggggtggggagcaggggagctcttgtgtgtctctgagtgagggggctgagacagcaacacccccaccccagctgtggcctgagctgcaggctttgttatttctctggcttgaggcctacacctggagcagagggaagaaaagcccctaaactcagccgtgtgggttcagaggacccctcaagcccaccaactctgcaggcaaatgaggctggttcatggggtgggggagagagcagcctcactcctgcctcagtgtggccgtggcctgtggccttggccgtggccgtggcctctccctcctaggccagagccaaccaggcctgcagcctgagctcagacctcagctttctctgggcccaggcaccggtcctgaagtgaggtgacattcatttcactacatcctgtgactgcactcacttcctccacgtggcgggaggtgtgggggtgggggtgaggacagattagaaggaaaacgtagctgggctaggggcctctgggggaggctgggatttcccaggggctggttggggtgggagggaggatgcgggaagctttcaaaggagagagaggctgtgaatgaagagaagggaggaggcggaggcagctggaggtcccagaagtggcacccattggccgcagcgacacggaggggagactgctgccactccaaggctctcagaggctgctggggtaggaggtggccctgaagggagcctgcctcggtttctctgctctctggggtgctggtgaggccagaaggaggagcaacaccccaggcctcacaggccaggtgtggccctgggctgagggcctgacccagggagggtggggtgctccgccccactgatcctcttctctcccccacaggtggagccatcgaagcccccacccacaggctgacagaggcaccgttcaccagagggctcaacaccgggatctatgtttaagttttaactctcgcctccaaagaccacgataattccttccccaaagcccagcagccccccagccccgcgcagccccagcctgcctcccggcgcccagatgcccgccatgccctccagcggccccggggacaccagcagctctgctgcggagcgggaggaggaccgaaaggtgagcagcgggctctgctggggaccctctggcctgggagagggagagccctgtccctatgtgatgacagccggctcctcatactgagtgcatgaccgcatcactcagtgctcacgacagggtgtgggaccatcacatccctgtttgggtgatgaggaaacggaggcttgcagaggttcaattctggtgatggagcaggcatttggttccaggacccaggcttttaaccaccatggcattcgcacagtggctcaaagcccaggtctgtgccattgtgagggttcggcctcacagagagtcccagaacctggattccttctcggacccgcctcttactagccgtgggccttcacgtgaatcactttctctctcagctgcctctgtttccttaaggtgttcagtagcttctaggggaccaaagacaagttctggggtggggcacggcagacacgaggccgcgggggcccaccctcccacacagacggaggcacaggctgggctcagtgtggcgccagcacactttggagatggtgatttcctgtccccgccccccaccccagactccaggtgaatgtcgctgggttatctttggtatggcttttggccacggagctggtgacctccatgttttcagaatctagttgggggtggcctctccacccttctgctgaactccaggttgtgcctgaatcagtcagaggagattacatcagactgatgggagtccctgctgggtctccacaggctgtcttgggaccttaccaagctgtgtccccatgataggaaaagctgccccttaacccccagcactggactgtgttgccctctgtcagtggaatggtgaactcactgccaccctccaggggatcttatgatggccataggccttcctggcatgtctgtctgctgtgcctctgtccacagttccccctgcctgctccccttcccctgagtagcgctgggggttgtgctgcttggtggtgtctgggagtagctgggcatgctcatgggggcaccagttggttcttttggaacaaaggtggacacctggcaccagctttgggggccctgggcactctggggctagaggcagccagcaccctacctgaagggtgtcagctctgagacctccctcttgcgtgctcagctccttcctgggtttaccattcttcagagtgtgtttctgtttcctagttttccatcaatggttctatttggtccttggggacaactcttgaracaaatggggcagggacagatggccccagtttacagatgaggaagctgagccccgctgggcagtggcaggtccagatgacagcctgttctcctgtctcccaggtccgagcccttcccacagccctacctgcataggtcctgctagggacacatgtacacatcccaggagtgcacatgacgcccagggacctgccttcccagcccagcaccctgtagagcaccgtgggggtgtgtgcacccagtcagccagagcaggtcagaaagccagcatgcgctgcggcccactgggcaggacgcccggggcgaccgatcaggctcctcccttctgaatccatgggaaaagaactgatagtcctggatacctgcgggcccctaggctgcccccgctcaggactcaagcagcatgaagacccaagccctttggccgtagagttggggacacctgccgctgtctgtgctctggagtggcaactgtggccatggctgactccctccccttcttgggcctggcttgctttctctgtcggataaggtgacccygagtgtcgccccactctgggtccgatgtcctgacagttgctgacgcagctccccatcaatgcactggcagtcactggtcagctgctccccacaggtggggagggtggggacagctgggacaaactcctcctgttaytggactgtactcccacgccgctgctgctgctctgggctgcggagccccaggccaccaccaatggacgggagcaggtcaggatctgcattataatagctcaggactgagaagcaacgctggaccaggagtcagaaatcccaggtcctagtcctgagtatgccacttactggagatgtgacttcaggccatctgggcttgtgtttgctcagctggaaaatggggatagtgactccagccttgcctgttttaaagggtggttgtggaagtcagataaggtcatgggcatggaagtgacctgcagacagcaaagtctggtccaattatgagggattacgattgctattattatctacccatagtaactgctctggctcaagcggcaacaaacacacacccagccctagatcccggtgctgatagagtgcacactcacaccccagcaggaggggtcatgccaaaagatggcagtgatctggatagataagggctgggccatagccaggcctcctccccagccgcccacacctacaccacgcatgctggctcacctggcacacttccccggcacctctgggctggctccagcacctccagggagccgcccagggagggtggggagagacactgacagccaccacagcagcccatgaaagccaggcctgcggcaggggtgctggtagctgcagaggggaagacacaggcttggtctgcagcccagggagcctggcacaggtgccaggggcactgtgcacaaaggaactgtttggcaagccagatggaaggggtgtggccaaccaatggcccttccactgcctggccccatgtggccctctagcctctgcccaccgccgccccccctccccgcccccgcccccagccccgcctccatgcacctttcactccagccccactcccatacttcctggagtctccaggtctttgtttatgctgctccctctgccgcatgggccctttccctaatctcttctcctccctggtcaaagcctcaaagcccaggctgtagttggccttgtattatagtttgcaggggaccagtggttctcaaagtgggatccccaaatgagcaacttcagcatcacctgggaaggcaaagctcaggccccattccagacctgctgagccagaactcgggggatgggacccagccgggcacctttaaccatccctccaggggatactgttgcgcacagatgttgagaactattggtgtagataacttctgcccactgctagcctggagcgcagggtcacggcccttttcttccatgtgaatcccccggacctggaatagcacagagtgggtgcttgggaaatattttacggatagaacggaaagaaaaatgagagtagccaagaccctcccacaggagaataatcccggagcccaggatcagggaggcggagtgcagagctgtgggtgctgggctgaggcagccatgctgtggctgggagtgtacagagtggcctgtgtgtgtccccctggcacctgccgcctgccctacccgccatccatatggtgggcagagcagggctgcttggggagatggggaggaggcaggccgagctctggggctgtggtcagggcgagtcagctggtaaatgttgccgcagcagagggaggkggctggcctcatggagggtgggtggggaggcaagcagtggggaggctgagagcttagaggggagtatggagcagagggtggggggcagagggagcaggacaggggaccaagaacagtccaagggccacctcagatccccaaatatgaatcagaggggagtccacagccccaggccaggcccctgttctcagttctgtcccctttcctctggcctcagaaacacaatggctaagatgcattgaacgccgactgccrggtgctatgtgcatgcattatcttattccattctttttttgtttgagacggagtcttgctctgttgcccaggctggagtgcagtggcgtgatcttgtttcactgcaagctctgcctcccggsttcacgccattctcctgcctcagcctcctgagtagctgggactacaggcgcccgccatgcccagctaattttttgtatttttttttttagtagagacggggtttcaccatgttagccagcatggtctcgatctcctgacctcatgatccacccgcctcggcctctcaaagtgctgggattacaggcgtgagccaccacgccgggcctatcttatttaattcttacaattgccgcataaggtagacactattattttcatcattctatcttattaagggctaaactgaagctcagagaggttaagtcacttgcctagagtcacacagcttgttaagtgctagtgctgaggctggaatgaggctggcttctgcgctccttaggctgtctcctgcgtgaagggggatggagtgaacagtgccccccggtggtgatgtgatgagaattcgtagtcctcccctggacttttgctgcaggagaaagcctttcactgcataatggcgctcttgcccttggggagaagttgggggcacttcatctccagcaagaactgcacacaccacctgcgtgtacaggcacacacaccagatggaggcactgctgcagacatgcagcttcttaccatttcttcctgcctcctgccctccttccttccctgcctctccctccctggacatacagctcctcttttcttctcttcctccctccctttcttcagacataggtacctttccaggtagttagcatgtagcagggctccgcaaggctgttggatgaactgagtgaccgtgcttggagggcctagtagaggggtaggaagacatcgaggtgggtaagccatgcctgccccccaggggtgggtgaggcctgctgggcagctcctctgatcaagccttctcctgcctgtagtagaagctgcagctggggtgcatctttgtgctggggaaacacagcacttatgtgtttgcacatgtgcgtgygtgtgtgtgtgtgtgtgtgtgtgtgtgtgtgtatgcatctgtgggcagcattggggctgcggttcctcctttcccctccccatcaaagtcyggcccagaggcctggcagccactgatttctcgtgggctctctccactctggtctgcaagtacaagggcctccatccttgggtggggtccctgccagttccagtggcagtcattcttgctgcccgcggtctgtcacctgctcctgggcatgttctgcctttcttgcactcagatgcccccacatggtcacttagggctggctctttgcttgacagtggttgcggtaaggtcatttcaaagagcatccttcttagtatgtttaaatagctatagaaaagccgctgcaccctcacctcttcagagacccagccagcgataatggcgcgctcactctgatctcgggggagttaggagagggttgggcgtgcttagcaggtttgtgatgtaaacagtgcccatccctgagctgagcaggacctacattttgggcttcggtttctctaaaattctcttaaattggacattattacatgtcaaatgtagttaatcttggtcagtacagtcttggatgggggttgtttggcccctgcagaagggcctgtgttgaagctggactctgtcacgtgacttggaaacatggctgtgagcaggaaaacagctcctagttggcttgagaggttcagacgagatggtgtgtgcaagtggttaacaccaggacatagcatatgttaagttagctttataatttattttggatatctacctacccatccacccacccacctacctgcctacctacctacctacctacacctttgtggtttacacccactgccgccccatgaattgcaggggcgtgggagaagagtaggaaaccatgggtggggacagagtgtgggcttagagtccactgagagcctagcacgtgaagggaatgttgtctctctttgggtcatcagtcactaaaggcctgagttccctttatcccttgaacaaaagtaaaacaaggcaagtggtgatgagacctaactcctgatggcaggggctgtagatcccttcaggggcctaggtgaggggccacagtcacttgggtccctcctgctcttaatggccgggttagggatggagcccagccctgctgataaggtgagtygcccagggccagggcaggaaaggccaggctcagctgtgcagaatagaagaatgggccaggcgcagtggctcacacctgaatcccagcactgtgggaggccaaggcagayggatcacttgaggtcaggagttggagaccagcctggccaacatggcaaaaccccgtctctactaaaaatacaaaaattagcccagcgtggtggtgcgtgcctgtaatcacagctacttgggaagctgaggtgggagaattacttgaacctggtaggtggaggttgcagtgagccaagatctcgccattgcactccagcctgggtggcaagagcaaaactccatctcaaaaaaaaaaaaaaaaaaaaaaagctgcggtgtgtggtggctcatgcctgtaatcctagcccttcgggaggctgaggtgggcaggtcacctgaggtcaggagttcaaggccaacatggtgaaaccctggctgggaaaaaaaaaagaaaaagaatagagctgagtggtggagcagtgtcccaggataattgggaaatgagcctttcctctctggtacctgggcttggcacaggagtcctggtcataccctgcagctgcctctgcagagagccacagggcattagggatattccttgtaatcatcccacgtaatgtttgtgctgcrtggaagggcatgtaaaggagtgttctctgcacggtaattgactcattctgtcatcatgattagttagggggcgcccagagcaggatgatggtcagaggttcctcatccccattttaccgatgaggaactggggcttagagaggccacacggctacaaagtagttttatctggatcttcccctctattaagcaagggctggcagagctgggtgtgctactgaaggagcagacatgtgtgggcttggtgccatggaagtggccacaggcagagcagtagcacactccagtctgggctcagcatggcatcaggtacttgtttacatgttgttgtctccctctgaaccgagtttcctatttgtttatctttgtatccagtacacagtaggtgctcaatagattttttkagtgcacccctgtgtctggccttgtgacatagagacctcagaggtggacagggctgaggtgtgctgctcgtgggtgtgaggtctggcccaccctgcacctccagaagacaatgaggccccagccaggtggacaggctgtggacaaggggctgcagccctggcacgagggcctgggaaccagatgggcaccaccgttgtcagctatttagcatttctggaacacctctgtgtgcaagtacccaggagctgtgggggactcagaggcgccaatgagacacggcccctcccctccaggagagtggcctttcaggaggatggaaggctttcctcggtaattatgacacgacctaagcagtcaatggttacttgtcggatattgttgaataattgaaataaagggctgatgagccttgggaggtgactgagatcagaaaaagtagggggctttggagggctctgggcccatgcgcatctacagtgattcccagcccactgcctgacccctcacgctgggatcagcctctgcaggttggcctgggcacgggtgtgtgtgcaagcatatgtgagtgtctgtgtggcattggggtacgcaagcgtgtggctgtagctctgcagagcctggtgctcaggcaacccaggacagggctctgcctcttgcagaagccaattcgtttcactgaattccatgaccacagacagtccctgggaggccagccagccagctggcaaaggctgggcatgcttcttgtcccagggggcccgggcaagtagctggctagatccggcaagttcatcccctcgactcaagcaccaactcgagacatctgctcaaccgatgctgggtcagtagcatccggtttaagtactgaagggaatacacgtatgtcaggctggctgtctctaggtgagggcctcaagagacataaatctcttgtggggaggggtcctgtgtctgggcacagccagcccagagtgtctgtgcctgtgaatgccagtgtgccttgaccttggattgcctgtatctttatggtgtcactgtgtgtgtgcctgttgacatggtagggtatagtggcatgttgcagtagaaagaccgatggactggtaaacaaaagatgtaaattttggttctaaaggcctcctttcctggctctctgatccctgcaagtcagataatctctctgagcttcaggtgtttcatctgtgtaacagaaaaaaataataccagctctgctttctgtaaagtgtaagaatacaatgaaataacatatgtgaagatgctttgttaattaccacgttcagtgcaaatgtgagagattattatcgtcatagcccagcgcatcagaatgagacgttgtatatggcttaaaataatccatccagtgagcagtgttgaaatgtaggtcagatcgtagcctcagatgtttagagagaggaaccacctaatctcacaggccaccaaatgtgaaggtgctttgaaagctgcaaagaatgacataaatgcaaagtgacaattatgtttaagtctagaagggacgttttagtcctcttgtttcctaatctggaatcgtaaagatccgagaggcactggaacctcgtacacagttgtatttgtacgggtttgtagatttgtacgtgtgtctctgtttgcgtctatggactcacgtcaggcacctactctgtgacagtcattcatcaagtgcctgccttggactaaatgcatccgtctaggcattctggatgccagcatgaatcagacacccacacttccctcaaggagctgaccgttgccttgctgggtaggggaactataggagaggaagggtctttcagctcagtctaggcaggggatgggaggagggggcctaggggcagggaatccaggataggaggctggaaaagcgagtaacagtttgctgataaacctgaggggaaggtggtgtggtcagaagaacagtctatgcctaggggctgaggccggaagcagtttgctttcgcgcttggtgctgtctgttgggaccacagtgtggagaagagaccaaggcgatccagccaaatcctggggaccgccctgcacatgagctgaggagcttggctggatcctcctggcccccgggaacccccgtggcaaaggtttaagctctgcagagtggcataatcagctttgcattttggaaagctcctagagccccagtattgccacatatcttgcggcaagagcgcccgccagatgttgggctctgtgtgatagtgagggatcgctgcatatggtgggcggcgtgctgggatttgcacgaggcagggagagggggatggggaggatggagtgggagtgaagtacgaatcaggatgtgtggagcgggggaaggtagcagttctcgagtgactatcacgtgtcagcttttgctacatcacctcatttaattcttataacatcactgtgaagtagatatcatcccattttatagatgaggaaagcaagactcagggaggttaaagagcttgaggttactcctaagcaaagagcagagcgaaactcccagcccggctctgccctctccaaagcctacgtgtctggaatttccaccccctcccctctgcgctggaagtgtggacgaattcagtcccctggcttgacagatgaggaaaccaacctgggctcaaatctgttcccgcgaactgtgttactgttcttcagctgtcccatgtcaccacggatcagattcttttctttcagagtattagcaacgcctcctaattcagggctacttgcagatttgataagcrtgttttacattcctttgctcaacccatcagcaaagatatggaataaaacagaccccgtgacagatgcgagaatgaaccacttgctacgcttccttggagccattgaggggcacggcccragccatctgctcacccttcttggcgtgttagccccctccctccgcagagggaacctcaggcaggcccagagcagaagcatcgcttcccrctttgccctaagactccatcgcggaagagttggcagaagagaacatgcttttcacaacgctgctcttagggccaaatgtcaaggggaagggccaggagttgttcagacctggctctcgtggagactccaagcacgacccagaagcatgcggggcctgaatgctgggccagccgtaaagctccttgcaccaggtgtggggtacacacagcacccctgcctggcactccccgccctctctggacctgtcaggacctggagaggtggcctggcaccggggggtccaccccttcctcctgggctgggttgcacggaattgaatccaacagggaaaaaaatgtgccgagcacctacaggccctgcacacgtggtgtaggtgagagatgccagcaggactgcatatggcagaggggtggcctgtcggggcccccaaaggctttctccgcatgcccagtggaagctggtgcccatcgtgaaatgtcaagcgtctttatttttaggtcattgctgtgtggtaactgtggttccctttcactgatcagacgctctggttggctttcacatctctgattagttcagaataaaagaaagtcaaatgactccctctgtcacaaatgcagcttgttaaagaaatagtttaaagcccagaatttatgggcagtaggagtttttccagaatctgccctaggcgctggggattcagcagtaaacaaaacagacaaaggggcagaccctttgtgaagctgtcttctcaaaacctgagaagcagacaggatggacacctccctacccccattttatggatgaggaaactgaggctccgagaggctgctcctgtaactaggaaatggacaagctgggctcatgcccactttgctttttccatgacctcacatgacccctaatgattttacaagtgctgatcaagacggtgcccatttggcactggttgaatcggattagaagccccacctcagcctgaaattcttagcagttgtgtagatccaatcagaaccttcacaaatactaagctgcactggcaatacgtcctctctgtgtgatcctttcttacactcgggggtctggggtcttcagaagatggttcagaagcagcaggcctcccctcccatggggcgtgtgcccttgggcaccctgagccctcatgaaggctcccgcgagtttgctcctcctcccacagcctttctgccctcacygcccgtctgctgtgctttcctgaaaagagcccctgaaggatctccggcctcggggctggcctctccctccacagacggcacggggctccccagtcccctggcatcctttccagatgcttcctctgctgtgctccttaaattgccctctttggtccttctccagccctcactgccgtgtcactctgcacagcttagtgacagtgctcttgaaggtcagccattctgacccctagccaagcctcctcatcctcagtatctttctcagacagctttggtctccagtgttggcagccctccccttccttgctcccacaacacaccagggtcctcttctgcacctccgagcattctctctctatctcctgtgtgagctctgcctctctccagcttgactgtggccaccacctatgctaagaccgggcacctctgttcaccctccatgtgcatgtctttggaggcctcccagaacttgagccrtgatggtctgccctgcagacatgcctcagctggaggatggatggaggggccagggatgctcttcccgctggtcttatgtctacagctggtcacagtaggtttccatttgtgtgtcccactgtcacctaaaaattaatgtggcaaaccacaaggtattttgcaatcacagaaaatgaaagttgagtaggttgttgagggccatcttactcaggtctccaggagagctgtggaccctcttctacctctgtgctgccagcactgccctgggttggcccctccttggggagggcccaaaagccatctttggctcctgacatcgtgcagggtatgaagagcagcctgtggcccatctgcagggtcaggacgtctttctccccacttccccagcatcatttctgctggggattagtcatgccagagcccagctgagtcagaagggacttgtgggtggtttgtggccaggctggagtagtgaggcaggactttctaggtttatgtctctgtgccccaggagacaagcatgtcagggcccagccgtgcacaggtgttatgtgaggggcggggagtaaaacaaacttctgttccaaactcggtgaatgcaagagatggagaggagctgagattcggtccctgagatcctcctgcaggctgacaggcatgcgcggtgccagctccacatggcaggggtgttcacagctgtacaagtcctccactttccatagttgtccatttcgagtattgcctggacttcaaatagatattgctaaatttaatatttcttttcacttgattttcttttttttttttgagacagtctcgctctgtctcccaggctagagtgcagtggcgtgatcttggctcactgcaacctctgcctcccaggttcaagcaattctcctgcctcagcttccctagtagctgagactacaggcgcgtgccaccatgcccgkctaattttttgtatttttagtagagatggggtttcatcgtgttagcaggatggtctcaatctcctgacctcatgatccacctgcctcagcctcccaaagtgctaggatcataggcgtgagccaccatgcccagcgattttattttcaataaaggtgattcattaagtagatcacaaatgtaattgtgtatctgtgaacaaaagctttctcatataaataaacttttaactcaaatcctttatcagagcttgtgttatgattttatggttcggaaaatgtggtcataaagagagagagatgccttccggggggacagcagcgtctgccctgaagttccccaaaggatgtattatttatatatatatatatatawatatatatatatatatatatatatatatattattatattatttagatatataaatatatatctaaatatatatctaaataatatattatttagatatctaaataatatattatttagatatatatatgggtgtgggtatttttatagagatggagtctcactatgttgcccaggctggtctcaaactcctggcctcaagggatcctcctgccttggcttctcaaagtgctgggattacaggcatgagccacggtgcctggccaaggatatattttaagtggggctctgaggggtgcctcaagcctcatcaggcaggaggggagttggtgggggcatattacacagccctggaagtgtggctcgtgggacaggaggaggctggggctggaagggaagccagggccagccccagacaggcctggaatgctacactgctgggatccacctctggcctcacaggctgtgtctgtgcctgcaggacggagaggagcaggaggagccgcgtggcaaggaggagcgccaagagcccagcaccacggcacggaaggtggggcggcctgggaggaagcgcaagcaccccccggtgagtgtcacatcctacacaccctcctgtgcacacacacaacacacacgtgcctggcctgtcgatggcagtgatgtatgtcctgcagggacctggagacatttaagaccaggtgatggggtatacccctccagctgcaggtaccccattcttcaaatcccaccctcacatttccctgttttcttatttatttatttacttttttactgagacggagtctcactctgttgcccaggctggagtgcagtggcgygatctcggcttactgcaacctccacctcctgggttcaaacagttctcccacctcagcctcccaagtagctgtgattacaggcacgcgccaccattcccggctaatttttgtatttttagtagaggcgagatttcgccatgttggccaggctggtgtcgaactcctgacctcaagtgatccgcccacttcagcctcccaaagtgctgggattacaggcatgagccaccgcgcccggccacatttccctgttttctgcatagagaagtggaggccctgagaagccaggggacttggctggttggtcttgggcctaagacttggaccaggcccctgactcctggcctccctctggaagggaagcaagagggcctgccagaatcccaggctggactaagatctccctggactatctatgaaggcccctccctaccacactctcacccagggtctcagcccccacctggaggaagggaactgaggcctgggagtctgatcaaatgggaagggggagatgcaggctgaggagtctctgtgaggcagcaggagaaccagggccctggggaaggaagtcctgcaggcatgtaggctgcagggccagccccagcgccaggcttctgggaaccagtgccgctgaggcctgggggcagctctggagaacaagacccctgggctgtaggagcctaactggtttatgtcttaaactcagatgtggagcagtcattatttcccagcaccagagacagctggttcctttcttttaccccccttccagctgagaatggtaaacttggagcaagaaggtaagggggagtcagaggctctggatttgttactcagcccttcaaagaaatgttctcagcaggcatggagcccaggacttgctccctttgggtagagagccgggttgaaggtgactgaagtgaaatgggacagtagaggcggggggggtggtgagttcctggaggtggggggtgtgggaacctgctgtgtactgagatgcacccctgccagttctgcctgaagatttgaggcggggggcaggggggcggagtgaagtcattttactggtaagtaattttaaaccttttaatattaaagcaaacgtggatatgtaatgaatgaaattcattctggaatgaaaaattcacgtgatgttgaaaaataacacggggcttcagagaggactttctggctggcagcagactccagattcccagggcccctgcaccctcctctgcccacagggcaccttaatggagaaggtgtgggaggagagccaggccggagtcagagcacactggtgactccacatttgcagcgtgccctgcctctctcctgaggcttggcaacgtgcaatatgctaagcaaactccccctgtccccgtccagtttctgaggacaagagccaccacctgtagcaaataaagacccagcaaccctttgactcatctttgtgagtctctggaatcagagggtagccacatcgctgagaggtggagtgaagcactcgggtgaaaaggtacaaggaagtcagggacaggagtgtggggacatcacctagacaatgacagagaagaggggcacagccgagtgaggggagaggggccggcagtcctacatcccctggcctgaagcacgctccagggcagaaggaaaaacactgtctttggggtccaagagacctgagttcaaattctggctccaccactgaccacctgtgtaaccttgaactgctgctgcctgaacctcaggttccccttctaaaaatagaggagaaaaggatgcatttctccttgcccctgtgagaacgaaatggtgcaagcaccaaggagcctcagcaaaggtcgggcctgcccccgcctggccaaacctttcctcttcaggaggccacggcaacygtagtttgacagaagagcagcaccttgatttaatgcttcccagcatgtgtccttgagcaagtcacctaacctctctgggctgcttcctcattgggaaaatatggctgccagtaaaacctgccctgtccacctcctggggcacttggcaaacagcaaaagagtccaaatgtgcaggctgggccaggcgcagtggctcatgcctgtaatcccagcaatttaggaagccaaggtgggcggatcacctgaggtcaggagtttgagaccagcctggccaacatggtgaaaccttgtctctacaaaaatacaaaaattagccgggcatgatggcgggtgcctgtaatcccagttactcgggaggctgaggcaagagaatcgcttgaacccggaaggggaaggttgcagtgagccaagattgtgccactgcacwccagccygggyaacagagcgagactctgtctcaaaaaaaaaaaaaaaaaaaaacaatgcagagctggctgtgtaaaaaacctgttccactgcagggcccagtgtccaccaggctggggtgcaggcctatggggtgggggcccagcatcagcctctcagcagccctgggaggcggggcgcatcccgtgcccctcgtggtctggatgtgttctagcccaagtcctaggttacacctgccgtcgcctggcctctcaggagaggcccagggtgaggaggagcatggtaaaggtgaagctgattgggaagtcagctgttgggaaagcaactccttgcacattggaggaaccgagaaagactgaccccgaggacagcagccagcatggcccttcctgggagcccatgttgggggattcctgctgcagccaaggctcagcccttgtggtcgcaggtgctggtcctggcctcttcccctcccatgcaggagcacaggagagatggcttctgaggacctgttgcagctgtggccctgggaatagatttgccagggagctttaaagcagctgagtgtgtcatccagctaagcctggggaaggagcttggctcaggtcctgacaggtgtgacagggatggggactgggaagtaagagatgaaaccctggctggaggctgtgagcttccacagccagcgctggacagggagggtccagatatacccactagtgccctcaccaggtcccacccccaagcccaagaaatcctgggctctctcctccttttgcccccaaggactgtctgtcttggccttcaacaggcatctgtccctgggtgccttctgccccctggcattgccctcacccaaaccagactccacctgccccttgcatgcccaggccagtgtgctcccttcacgacaaacactttccacttcctgagcactgaccatgtgcgggaagccaccagaggaagatgccttctatttcagtcaagtgtgctggagagaggaggccacacataatcacagtaaatgtagcaccggcacgtccttcttcaggaaccccccgggactccattttttaggggacaagatctgaattccagcccctcaccatctgaccactcctttccctgctatgcctgatgccacccctttggccacagaaacctcaccttctcactgctccccaaacacactagccagccattcctcctgcccgccccttacacagttccacagcctgccttctctccgcctgccccagcaccacagcccggtagaacctagcctgaaaatgaagcccagttcagccactgtgacccacactggcctttcccttctccaactgtctccaaagttaataaaaatgaactgataaagacaagttccaagcccaccgatcacacacatgggactgcagtggtctgcagacctcactttgagaagcatttgttgtcacctgtcggtacagaactgagtataactattcagaagcttttatgtgtgtgtgacaatgttgccacatccacgtgctgtgattttatattttacaaccgtatcatttcttggtgcattgagaatttaaaaatctggaaccaaagcttgagctttcatccctgacagtttgaaaatgcaccgccattgcatagtcgctgagctgtgccacactgagtttgcctgcctcactgaggacagagaccagcagtaaaggctcatggttatgcagcatgttactgcctacaaaggcgttttacaggggttaccttatttgatgctgacaaacctgcgtgaggtagttggggaccgctttcattatccccacattcagaagaagagactgaggttcagagaagatgatcaggacttggacttcacacctcccaactgcaaagcctatggtgctctttcctccttatcactgcatccgtgcagtttggctactgggtacctacccaggggttctctgtcagttaatatgtgaattcagggctgctggaaaaagtgtgtggaactggtccaaaaagcatacaaagaaaatggaactgaagagagttattgacacaaataccagggagcctgtgtgtaagtgccgaaggctgcagggggctgagggcaaagaggtgcgcctgcttaaaatcggcaacggcctagttgtctgcagcactggccagagagccaggatgctgcagtcagagccggcaacaggaaacaggaagtcagctgcagggcagggcggggcttaggaagggagctggcacctgggccagggcctgcgggctggccagtgcccatgatagggaggcgggggctggtgcgtggagctgagcccgtgtgtgggtgtgaggtggggaggaaggggcagcctctaaggatgttgcagggtgacaagtgtgggtgtctgaggctggttcctgcctggttgccagcccagacagtcctgcagaggcctttgtccttcatgggtggttccggttggagccctgaagggagagtttctgcctttgcccacaaggccctggggggtgagtggccctgtggggctccatcccctatttactagcgatgcgtatttattcattgacgatttatacccaccaacttcctccagggttatttttgctcagagggagcactctgaggtcacctcctgctaagaataacccagaatgggagggaggaggaggagggggctgggcgctggtgctgagctcagctgagcccaagctggtgttagggctgaccctccaacaccgcaggagtgagccagtccaagagggcaaactgccccacttcagagcagatgacttggggtaacctaaatggggaagtcagggaaccattctgctgcaggcaaaagtcagctaggtacagcttatggcagctcttggaggtttgcagcactggctagctttccagcctgataggacctttgattcttctccaagttaagacagagctcagcagccctgcttgttttcagatcagagccgctcctgggctaaccctccggacctcggctgggtgatatggtgcccctaccttttatgcatataacttcctgacatcgtgtctcccactcctgggctgcagcccytggcccacccctagaggtggcttttcttcctgcgagcctgcatcagtacacgctgctgcccactctgtctcctcatgttttggaaggcatgaggaagacaggccgacacactgcttgtgaggtagagcctatggttatgaaccttgcagctccacccacccactccccgacctgagcggtgaaatcaacgcccgctactggagtgctgcatggaagggcctagcccatggtggggacttaagtgcagtgggactcctaaggatgccggggaagccagggaagatggaggaggtggggcttgacctgggccttagaagggaggtgacatttggagaagtcaaggggaaagtgagaggcacccccgaccccagctgagctgggtgtggaggaaggaaggcatgcagggcagggtgagtgtggggaggcccaaaggcaggggccatgagcacacaggcacaggcctggctgaggggactagggattcattgaaaaatgtatacggggctgggtgcaatggctcacacctgtaatcccaccactttgagaggctgaggcaggtggatcacttgaggccaggaattcgagaccagcctggccaacatggcaaaaccccatctctactaaaaatagaaaaaagccgaatgtggtggcacatacctgtggtcccagctgcccaggaggctgaggcacgagaatcgcttgaacctgggcaggcagaggttgcagtgagccgagattgtgccactgcactccagcctgggctacagagggagactctgtctcaaaaaaataaatttttatatatatatataataaatagtagctgggtatggtggtacacctgtggtcgcagctacttgggaggctaaggcaggaggatctcttgaccccgggaggttgaggctgcagtgagccataattgtgtcactgcactccagctgggtgacagagcaaaaccctgtctcaaagaaagaagaaaaatcttctcaatcttgattggaaaggtagtttgcaggcagcctgaggggcttttactctttatcctctctgaaaaatgtgttatctggaaggttgtgaggaggcggatatgacgtgatgggagtcgtgtttgagaaattggctctggcacccatgagcatggcgttcatccctgagcatgagcacatgctgggagaggggagggggcaggggcgccagcaaagtcccagggcctgtggggggtggcagtggcggggcagaattggccaagcctatgctgctggccctgggaacgctggagaggaaggggtgaaaggaagccctagcaatggcacaacagggacagcatcagcgttgttgtcagagacaaggcttctggaagggagcagatggggaaggggcccctgtcaaggccaccttacatagctggtcttacttggggagcatttaagtagaatctcagaatctcctttttttttttttccaaaaataatccctctgtttattttcatctctccacatcccagggccaccttcagcgagtcattcattcccacaggtcctggccttggtggccttcctggggccccatgagcttttctagggcccgggctccacctgcattgttcctcctgttgcaggtacgcgccggcacacccattggaggagagctgttgacatgggctttctttcatcatccccacctagagaattttgtacattttggttctcctacctcaagaaagacataagcgagttggaaaagctccagagaagggcactaaattgatcaaggggaaggcaaggctgccaagagaggacaggctaaagagattaggactccccagtctgcagagacaaaggcagaggatgtgattaaggctatgaaatcatgtcgggtgcggcgggctgagcacagcacagctggggggcagagggaggacacccattagaaatttcagaaagataaatgaagcacagaaaagatagcaccattttccatggtgggttcccttcttaccaaacctgtcaccctaggattggcagaaattgaaaacagaagcaacttcaaaagagatttacttaacgtatgggatctctcatacgtaatggcttttttgtttttgtttttgtttttgtttttgagacagaktctcactctgttgcccaggccggagtgcagtggtgcgatctcggctcactgcaacctttgcctcccgggttcaaacaattctcctgtctcagttttctgagtagctgggattacaggcgtgcaccaccatgcctggctaatttttttttttaagggtcgaagggatttattgaaaatgaaagtacactacacaatgtgagagcaggcctgagcatagggggctcaaaggccattttttttgtatttttagtagagayggggtttcaccatgttggccaggctggtctcgaactcccaacctcagatgatccgcmcgcctcggcctcccaaagtgctgggattacaggcgtgagccactgaacccagccagcataatggctttttaaagggagcctccagctcactctgaaatcctttgaggttgacttcaaagagcacaaccaggcccttttccaggtggaccagtgtccccgctggaaacagaaccctgagtgggccggccactcaccacgcatggtcattctggcatccatttgccatggcttgtgacggcctagccaggccatggmctgagtgacctctaaggctttgcagagcccagagttctctcctcagacacacgggtggagagatctctggggagaagggagacaggcagctcccagcagatgtggtaaggggaatggtaggacctggagggggtgcccaggctgggaccagagtttccagagtcggccctctgtggcctctggtcccgccatccctgaccccactggctgcgcttttagccaccccacagggaaaagggaaattggaggagtcagggtcctagctccatagcgttggagcttgctccatccaccccaggaaggccgarcaagggggcatctggggaccccctggcccctcctggagtgggcatggagcaggcatctctggctctccctaccacaggccacttccagctgctatcagatctctggtgagggccgccaggggaaagggggctgccggaagggcgggggcgggcagtcatggccccgtgccaatgcttcgggggcagagctgccctgcttacgtggacatgcagctgtttcctgaaactagagtcaacctggaaaaattcaggctggttgaggggtgatgggcctgcagagctgaggaactggaaggagcgaggagttgcggtgggagtggaggggctcactggcgtgtttgtgttggcatcacgcagcttccttgcacccctctgtcctgtggctggcagtgggtgtctgcaggcgtgggggtgcctccttctcaagtctgtgcacgtgacggtgaagagtccgtggctggcctgatgccagggttcccggttggcatggaatggatctcacagaggcattaaaagcaccatggcaggcccggccctctgggtgaccaaggtgaggtcgcccctgcatctgctgggctttgggggagaaggcaagaggagctcccagtgggaaaggaagaggcaggggaggagggagaatggcatctacccaccccccacccccacaggatcccccttccycggtgatcgctgcaggtgggctgcagcctggggacagggcttcttgccccaggtgccagggcctcatctcccctgtgccatgaccttcacctctcctcctcctggattttagtttttctgtgtaaataactatagtaaagcaacacttaaaaaccacttctggccgggcgtggtggctcacgcctgtaatctcagtactttgggaggccgaggtgggtggattacctgaggttgggagttcgagaccagcatggccaacatggcgaaaccccatctctactaaaaatacaaaaattagctggrtgtggtggcacacgcctgtaatcccagctactagttgggactgaggcaggagaatcgcttgaacccgggaggcagacgttgtaatgagacgagatcacaccattgcactccagcctggagaacagagtgagactgcgtctcaaaaaaaaaaaaaaaaaatcacttccataaaattagctggatgtggtggcacatgccagtggtcccagctccttgggaggctgagataggaaaatcgttgaatttgaggctgcagggagctatggtcacacccctgcactccagcctgggcagcagagtgagaccttgtctcaaaaaaaaaattttttttaattacttccataaaaataaaaagttaggtgtggtggcaggcacctgtagtccctggtaaaactgaggcgggaagattgcttgagcccaggaattcagggccacagtgagccgtgatcgtgccaccgcactccaacctgagtgacaaagggatatcctgtctcttaaaaaaaagaaagaaaaaatcacctccccatattgggagtttcagacattgccccaccctgggacgcaaggctttgcctggagtgaaggaggggcaggaggtctgggtctggcccagactttgggcaaagggggaagaggaggcggcggcagggctggggaattggttccggctgggcaggccacagcagagggctcctccttgccttgcctctgtcttttgcttgaattgagcgctgctcaggggagggccagcagcctctgcccggcctttcttgggcactgcactgccacctctgccttctccaaaccctgggggcatttgtgagcttgcgcttttctgagactcaacccagagcgggagtcggccttcaaatgcctcgcctgtacctgagccatcctggaagctttactgmtcagaggcgtgtgacccaaggcaggcctcagaaaagcgagtatcgctccagctcccctaggatccctgtgaaaattacatttattaattttataagcatatgtatgcccagtcctgtgtgggatgctagagagccataggtggagaggcctacaaagttaaataagattggccgggtgcggtggctcacgcctgtaatcccagcactttgggaggctgaggcggatggatcacctgggatcaggagtttgagaccagcctggccaacatggagaaaccccatctctaaaaatacaaaaattagccaggtgtggtggcaggcacctgtaatcccagctacttgggaggctgaggcaggagagtcgcttgaatccgggaggtggaggttgcagtgagccgagatcgcgccactgcactcgcctgggcaacagagcgagactcggtctcaaaaaaaaaaaaaaaagttaaataaggcaaggctcacagtcgaggagggaggccacagtaaacagataattagattcagaggtatgaattgtaaggagattgggtgagaaagggctttgtaaacaaacgtggcatgcattggctgggacaggagtgacagctgcggtgggttcacccccacccttcagggcaaggctgggccagcagctgtccacacctgccaactacagggggctgaggggtccagatccttccatttaaaggagcattcctttaaaatgctccttagaagacagaaagtagaagagtggtgactgggggagaggcaactgggaagttagtgttgaatggagacagtttccgtttgggatcgtggaaaagttctggagatggatgggggtaaaggttgtataaccatgagagtgtacttaaagtatgcttgaaaatggttaaaatggtaaatgttatgtatgttttaccccaggtttttagaagtttaaaaaagtgtttctaggccgggcacagtggcttacgcctgtaatcccagcactttgggaggctgaggtgggtggatcatgaagtcagaagttcaagaccagcctggccaagatggtgaaatcccatctctactaaaaatacaaaagttagccaggcatggtggcagtcagctgagataacaccactgcactccagcctggacaacagagcgagactccgtctcaaaaaaaaaagtgagcgatcttggctcactgcaagctctgcctcctaggttcacaccattctcctgctgcctccccagcagctgggactacaggcgcctgctaccacgcctggcgaattttttgtatttttagtagattcggggtttcaccatgttagccaggatggtctcaatctgctgacctcatgatccacccgcctcagccgcccaaagtgctgggattacaggcgtaagccaccatgcctggccaaaaaaagtgtttcttaagccaggcatggtggctcatgcctgtaatctcagcactttgggaggctgaggtgggtggatcacctgaggtcaggagtttgaatccagcctggacaacatggtgaaaccccatctttaccaaaaatacaaaaagttagccaagtgtaatagcagacacctgtaatcccagctacttgggaggctgaggcaggagaaycgcttgaacccaggaggtggaggttgtagtgagccgagattgcaccactgtgctccagactgggcaacaagagcgaaactccatctcaaaaaaaaaaaagtgttcctttgataaagacagtccctgtccttgcccctaccctcagcccagggtttttcaaagacattattgccattttgtctggactaaatctctgttgggggsgggggtgtcctctgtctggtggggtgtttagcagcttccctagcctctactcactagatgccagcacctcaccctaaccttgtggcagccaaaaatgtcttcacacacatgccaaaatgtcctggtggggagttagcaaaatcgccccagttgagaactacggccttaacctgcctcaaaaagctgctcacaggagaggactgaggaaaagccggaggcaaggtgggggttctgcccagaaggaaagcgaagattggcaaactcggagggaccccaggaagtggtgggcaggatttgaagacccaaagtgtggtataccgggtggggrtaggtggacagtgggtgataggaccaagctgtactgaaatctagaatgatactagattcacaaccctcctgtggcccccatctggccccccacgggaggagaagtgatgggtagttactgcggcttttcccattctgaaattgtcacctgcagctgcacctgctggtggtgccttctagaatggtcggcacccccaacccagccctctcccagataatgggcaacatgagtatctcgggggtgtgctgtgtctctttcaagatgactgtcaaaagcaaacaaaagcagattgtttaacagacatggcagcaaagctgaaactccctctagcttgagtgcaggaggttctcacttttagcctcgtctttgccattcacgaatcaattgtgaatattgtctgagcacctgtcaggtgccccactccctgctaagtctagccggatcgagcaaagtctctgccctccagatcgagcaaagtctctgccctccagaggtcaacaagctgtggagacaggggaaaggaggggaggagagtggctgggaggaggacatggagttgggggcagaagaggccaggcctggctggggtgcccctccctcctgggcttccaggctgaggtttctgcccttctcaccagggatggctccttcagtgagcacccagctcttccccagagacttggacagttgcttcaggccatttgactgggacctttttccttcctctggatggttttgtcctgctggtcaccctgagccccagagagccccattgaggggccacacttagcttgagggagttcttgatgggtaggatgaatcaagggttgagcgtggcagaagtcattgccctcccccccaaatcccagaactttggctgaatcatctcatccagaacctgagagagcaggtgagcaggaggggatggttgggcagaggatggtgtggaccagatgcgggagtggggatttcagcgggtgagctaacccggggctggaaatgtgcaacatgccccgctcgcccatcatctgcccagcatgcccggctcccacctggctttgggggcatctctgggagaatggcgcatctggtgctgttgcagactggggtccgcgggcaaggccagggcagggcttactcttgtgcatgaaggactgggttggtcgggagcctggggctgtgttgggcctcagagccggccctcataggtctctatgctacggagccagcagtcaacaggaagtgagtcccagcatgagaggaggccatgtggtcccaggcaggaagtgagtgacagtggagttgcctccagcagctttgcggggctcagagcctgccccaatctgaggtgtctgcagggcagcaaatgatgagaagaaaggaagacgcagccatgaaaaagtctggctctgacctaagcttcttagctcaagttagccaggcaggaccccacgcatacctctatggtagtgccatgttgggggctttggggtacctggaacagctggatcccagaaggtggctgcagtgcaggggtacactccacttttcaggctgctggggctcatgactgagccttgaagggtgacagacagggtttacaccagggaggaccattctaggctggaaatgccctctttgcttaagcagggagggaggagaggtgttctgagttctggggagggtcctgacacacaggatggaggcaggggtctgccgttccactttccttcccggatttggccttcctggctctgctggcatcagcccaagcccccaagcacagtggaggacttctcgcttttaccagtcacctcctcttcctctcgttgcagccccctgcctccaactgctgaggagtacacacatgcagctttctgtgggtgcttccctcctggaagcaggcctgcccagctgccccgcacagcaggaaaggagcttggcaggccctgcagttccttctgctccctctccggctgctccctgtgcccgggtccccatccagggaggaaagcatacctgagaagactctggttttgtttttgtttttgttttcccaaggcccttgtccctaattgccacctctgggcgttccttgccaaataacagtgggttgagagttcaggtcctagaccgttagagcaaaagcagccttggaaatagggctttgcaggggaggggctggggacccagtgctgtctcaggctgtgcacttgagtggtgggaaactctggagggaatttggcagtatctctgcacatttagctggacaggccctttcacccggcctgaccacttctggaactccgtcccatggaaacacgcagctgtacagagctgtaagtgcaagggtgttcactgcagtgaaaagcaaatcagcccaaatgcccaccatcagggaacggcatgcatacattttggagcatccagatccatctgcactgggatggagggatgcccactctgcttgttaagtgaaaaagcaagttgcagaacattacgactagtatgatacccttttggaaaaaaacatttctggatctgaatgtgtatatgaatacatatgtataaacatgtaacttacacatgattgtcaatgcataggaaaaaatctggaaaggatgctcactgaactgttaataatgggtaccttaggggagagattttgggggtagggagctgaaataggagctttaaccttttagcattattttttttttttttgtatagtcttttttttttttttttttttagatgsagtctcactctgttgcccaggctggagtgcagtggagcagtttcagctcactgcaacctctacctcctggattcaagtgattctcctgcctcagcctcccaaatagctgagatgacaggcatgcaccaccacacccagctaatttttagtagaaacagggttttgccatgttggccaggctggtctcaaactcctgacctcaggtgatatgtgagggagcctgcctcagcctcccaaagtgctaggattataggcgtaagccaccacgcctggctacagtttgatttttttatgatatatgtgactgacttttataagtagaaaaaaaaagacaagaaagacaaaatctccattggtctagaccagtcatctccacctgacaggtggggaaactgagatgctgagagcagtgccttccttatctgaggcttgccgwgctgatgctgtccctgcctttctactgggtaggtgttctgcatacggagccagcgaggcagagttgctgagtgcagcctggtgcctgtgggtgtggcagagtgccgagccatggggacccctgcctgttcctgtcccacactggacacctccattcttcttgaggtgtcctggcccacttgcctctggatggctgaggactgaatatatatacacagcagagcacacagcaggcacccggctctcctgctcttgctttgtccttgcaaagcctgtgacctggagcaaatcacaaaattccagagagcctcaggttcctcacctgcttcccagggaggctgagaaactctgaggaggtagtaagtgaggagctttgtccactgcgcagtgacacacacagacagccaggattattctttatttgatttttattacctggaaccttagcgagttcagttcttagactctaggggataaagaaatgatttcccttgaagggagaatgagagaccccagtgctcaggaagagttgttgcagagcctgaaaactgtttgccagagccttggctcttctgggtctgagtgcctgaaagaatctggggcggcccaggccaggggagaaggctacgctaggctatgagcctacagaatggttttttgggggtcctccttcgactctcatgcctcaagagaccaagaggaaagctgggagggcactgaccacagaagtcagaccagcctgagtcccagacttgatctggtggcactggaatcttctaagggagaggggggtcttattggattatgggtggcacaaggagcttttttttttttttttttttttgaggcggagtcttgctctgtcgcaaggctggagtgcaatggcgtgatctcggctcaccgcaaactctgcctcccaggttcaagcggttctcctgcctcagcctcccgagtacctgggattacgggcatgcaccaccatccccaactaactttgtatttttagtagagatggggtttctccatgttggccaggctgctcttaaactcccgacctcaagtgattcacctgcctcagcctcccaaagtgctgggattacaggtgtgagccaccacgcctggccggagcatttcttttttaacaggggctgcagagaaggcttggacgtcctatgtaacctcagtgagtggcggtgggatgggggagccgatcccttgagaagtgcaaccaggctggcaaacctgcttggattcttttcctgtttctgaagctggagtccacagactcgtgatttcaaggggtcaagcccaggaatcctttgatgttgaaagcaaaattgtgaatgtatctgtttgcatgaaggtttatatgaacacagtttctggacagaaagtgcataacattctctagaatttcagagcggtcaatgatccaaaacaggctaagcccactgatctaaccctcctcttgtgtatctttcttacatttgcaggtggaaagcggtgacacgccaaaggaccctgcggtgatctccaagtccccatccatggcccaggactcaggcgcctcagagctattacccaatggggacttggagaagcggagtgagccccagccagaggaggggagccctgctggggggcagaagggcggggccccagcagagggagagggtgcagctgagaccctgcctgaagcctcaagagcagtggaaaatggctgctgcacccccaaggagggccgaggagcccctgcagaagcgggtgagtcctcagcaccaggggcagcctcttctgggcccaccagcataccctgagagtcagggacttggctctccagcaggtcccaggaaggatggtctgggtcgtggctaaaggtctgcttgccaaggctatggcctggaggctactggctggatgcagcctgcgcatatgttttatttggcccatagagtgttttaaacatttaaaaaattagttgccagtatttaaaaatcaaaaaatttcacataaaaatctggagttttggcttctcatgaaaaaaaaaaaagctagatctggcaacagcgggctttcataacgccaacgattgctagactgggataatggcggtccctccatcgccttctgtggctggttgtgggccttagttttctgcagctctacctggcctgcttactctcccacgtgccatgcagttcctgggggttgctgtatttgtagcccctggcctgggcactcaagggcagcagataccctgtttgcctccctgagtgcagaggtcctgagcccaccctagttgggctgactcaactggaaatttggttgtgacagtggcgtggggagagggctgggtgattgtattctgtgtactgcccagcccaggcctcttcatctggggactttttggcctaaccctggaagcctggaaagttgcccacttttctctttcaggttaagccagcaatttcagggccaaccgagctgtaaacatgttagtaatgaggacaactagcatttgtacagggcttcacagtttacaaagcgctttctcatacattatcacatttgatcctcccagggccctgccaggttgttttgcatatgtgcattttaatttcaaaaagtcttccttccaagcgtgtatgatgaaatgagtaaattgattaattggcgtaacttattttgcatggatccaacctaatgttcatgcaggatagagaacatttccagaatacaaatttccaaacttattaagaagcttttattcatttattattcgacaaatatgtatgatgctcccactatgtgcagaacactacagagggaatctgtattagttgttttatttactcctctaacaatcttattcaagagatatgattatcctcatttcaggagaaaaatattgaggcttaaaacaatgatgtgacttgctcatggagccccaaccttaagtggcagatccagggctcattcagtcctggtcttgtgcctttctactattttccgctgtcctggaatgggacttggtgcggagacgggtcctgaattgtctaggcctcttgcacatattctgatacttcccgagagtgggaagggcctgaggggagtgaaacagatgaggaaagggagaagacaccatccttcccattaacaatgccaggtgtgtgagagaacccatcagccctgcccttccaaatgtggtgcttcccatgggctgactgcagttgacttcgcttcccaggaccccaccatgactcctgccgagctgctacccagggtcacggcattccttcctgccctgaagcatggagccatagccccaaagctgttctctggccttgagggtttgttttcactttgggatttccctacttccatttctagctgttctcaagggctcctgcatcgatcagtcaacaggtgtttcttaaaacacccattcagggtgtgctaggatccataccagggactggggaaactattatgaacaaaaacctgcttcttgccctcaaggacctcacagtcagctggagagacagacattaatgagaaatccacccttaaaaagatgagattacacatggagataagcgctctaagggaagtgaaacatgtccaggggaactgcaacgaagaacctgagttggcctgggctgtccagcgcgagctgaagggcgaagggagtccactgggtgaggggtagagggagagagtgagaacagggaagaaggctcccaggtgggagggagcagggcacccagggaactgatagatgtcacaaggctagagtgcagagagcaaaggagaagggtgtggaaagtgctggggcagacaggccaggccttcaaaggtggctgccggggtggggggtgggggggcggggrggsggggggkgggggggcggggagtgggcagtgtgtgtgatgtaatcagctttgcaatttgaaaagctcatgtcatctggatcctgggatggaatggaggagctgggaagcaggatgacatcggaggggctgatgagcaggatggcagcagagatgaagggaggggacaaatgccaggaacatgagaggtgagggagagatgctgtcaaggatgattcctgggtctgggactttcagacaggtggatcttccttagaatcttagtgctgagtgtggtgggcaaaaactctttaagtctccttgacctccaaaatttggccttgaggctgggcacagtggctcatgctggtaatcctagcactttgggaggcccaggcgggcagatgacttgaggtcaggagttcgagaccagccrggccaacacagtgaaaccttgtctctactaaaaatacaaaaaaaaattagtcgagcttggtggtgcatgcctgtagtcgcagctactccggagtctgagacaggagaatcacttaaacccgggaggtggaggttgcagtaagccaagattgygccactgcactccagcctgggcaatagagtgagactccatctcaaaaaaatacaaaaaaaaaaamcaaactttggccttggtacactcctgtgtggtcccagctatccaggaagtatagattctggcagggatcagagctggtaggatccctgaaggccactgcactgcctggaagctgaaattggtgagatgttacctcgcggggtgggcagtggcctaggctctgccaatatgcaacggacagtggcttaatcagggtgtggaggctcggtcacggttccagcagtcagctgacatagaacacatgctcagctggttgattcagatgaggaaggagactaaggccccggagaggatgtggctcggccgtggtctcctttcagttccccttattccaggtctcttttcaggggatgctctcctggaacccctttcattagctcctgtacagcaaaaacagactttttaaggcagcgtttcttgtagcctgagcatgtgctgaaagtacagccaggagaaagaatcaggaagacgggagatgatgagatgagtgatagggacaggagccaacacccgacaggcctgtgcttgtcttgggtctgttcctgcccccgccagcattaatgccataatgatgatgattcaggtggcagtggcgatgtggctttcccttattgagtattgactgtattgggcattctctctcctcgctactcacagtggtccatagaccagcagtgttggcagcacccaggaatttagaaatgcagaattccaggctccactgaagacctgctggatcagaatctgcattttaaagagggcctcatgcttcccatgtatatgaaagtttcagaagctctgctgtgtattatgccccatgtgtgatcacgggaggaagatttttttttttttttgagacagcgtctcattcactctgtcgctcaggctggagtgcagtggcacaatcttggcttactgcaacctccacctcccaggttgaagcgattctcctgcctcagcctccggagtagctgggattacaggcgccagccaccatacctggttaatttttgtaattttagtagagacagggtttcgccatgttggccaggctggtcrtggactcctgatctcaagtgatctgcccaccttggccttccaaagtgctgagattacaggcatgagccactgcactcagcctggaagactcttattatcctcatttttcagatggggagactgaagcttcagaaaggttaaattacttacccaagattatgcaactggtgagagaccggattagggtcagcacaaaacccctctctactctgagcatagggccccttttcaggccagtgactgccctctgaggtaaacctggctacagcctggtcatggagatttgagttcattttaaagagaacttgggtggcctctggctgagtatagctcagactcgaaggcgagtgttagaagcaccctggcctcccctgcccccaagtcctgagatgcactagggtcatgttcgggcctgtcagggccacactggaaggtcacaaccacctggccctggcggtgaccctgggcctgggccaggagcagttgggctgcataggccgtactgagagagcagctgaccctccctgactcacgacaagtgccgcattccgaggcggcccggccaggctggaaagcgtgtgtctgtttgtgktgtgtgtgtgtgtgtgtgtgtgtgtgtgtgtgtgtgtgatcactcaagtgggcatgcgcagagtctgtcagggagaaaattccagaaagaagccagttggaaactgcatagggaaaaatcgttctgttttggggagcttggggggctgggaaattaggaagggggtcacattgagaaataacagtagtggtgcagcggagagggagcttgccggggcatcaggacccctgaaaagctcatctcagctccggccttaagtcactccaccccccaggtctcagctttctgcaaaatttaagtgctgaacaagtactcaatgatctctgcaaagcctttcaaccctgattttctaatattctaatgaataaataattatccgtaaaagtaattaaatgccatggagggtcccaagtaggaaacgtttgaggttctaaagcgggctggggagaaaatgcagtcggaagccccaagtccaggtccgagagccagcccgggggtcctccactccccgccctagccgcagggctgacacagtggttcccagcgccaccgcgagccccggagccccgccgcgtcagggtccgccgggaccgccaggccgcccccaggccgccacctgatcgcgagcaggcgccccctgctgggagcccggggcctcaccgggcagagcaacgaggtctgggaggagggggaagccctggcctgggaacggggaggccccggacaggctggagggggcccccgcgaaaaaagtggggagctggctgtggtgggagagaggacggaaaggaaacagggaggcagagccagacaagatgggtgagacagcccttaaaaggccggtcacgaacaaagcgctggcgagtgcgcgcccgcccacgcgcacaggtgcccgcgacaagacgccccgtccccgcccacgcggcccccgcgggctgagcccggcgccaggcccgcacccacggtggccctcctgcctccctccccctggtgctcccgggcctagctagcgggagtcgctgtcaccagggacagaaccacggaggacagcgctgtcctgggcgcccggggtcagcccaaaaccagtccaggacccccctgtcacgagggaagggagtggcctcccgggctgaggacccgcggcgtgaacactgtggctggcttccgcttcacagccaggagatgaagtcggggctgttttttccgtttcaggctctttgtctccccccaccccaagctaccatgagccagccttagtgaccttcctgcagtgggcccaggcccgatacgctgtcggttcccgacaaagaagctcaggggcccaggtggaaggagggctcacttccccacctccagcaagaagctatgggaggcagaatcagccagccccgcagcctccggggcgctgggcctggaargggtgcctggaaagggtggtgaggacctggtggggagtgcagggggatgcctgggaggagcgcagctcccctcatgctgggggcttggagaagcacagggagagggcaaggtctcaatagggaaattgagacttccctgccaggacctggaatcagggcccagtagaggaaatgaatccttagggaaggagaaccacactaacatgtattgagcacctacagtatgccaggccccacagtaggcacttaatgctcaccataacctaatgattttagaacatttatctaccttgattcagtgggaaaacaggccaggagaggttacagaggtcacactggaatccaaactcaagtcttctagattaaaggctgagctcaggggcctgagcatggggcagggagtggagggacggagaatgagattagtaatagaatcataatatttggacctgcaggcggaccttggaaatcgcatccagcatccttattttccagatgaggaaactgagtctcgtagagaggaagttgcttcaccggggtcttgttccagttggcccggtacccaccgccccccagtacatgcccttatgcccagaaggcctctgcaaacactcccttgcagggccagggaggccgctcaggctggccctctggcccaggccttcctgcaccccctcctccttccgcaccccctctgccttcctgctcctcctttggggaaggaggtctcttgactgggagcagcagaatgggggtatttttagtccccttctgtgtacctgagacagagttgacaggccagaaacccagctctgaatttcctcgtgttccctcttgcctgggcctcaaggcctgcccctgcccgagttctttctctgccctaggccctgctgggtcctcagggtcagcactgtgcctggcatgtggtgggccatcatatttaacacatgaacagctaaacggccagaggacccccatcccctgtggcagggaccccaggcacaaggtggggcctgtgagccactccagtaattctgccgaccaacgaactggtccctttgttcttccctctccacaggcaaagaacagaaggagaccaacatcgaatccatgaaaatggaggcaagtgttccacccccaggggctctgtggatcctgattctagaagaaggacacgggtggcgagtgtgtgtgagggggcggagggtgggcccctcctccttctttacacatccctctgtgggaaggagaggaagtgggcgtggaggttggaagtcccccaacaaggcagccggctcatccccctccagaggccagacgcctcccttcgtggcctgtggccgtgtccatgtgcccccccacccccgccacacatgcccctcgctcctccagcccacacggggcctgcccagcactcccaggggtgccctctctggccaggagccagtgtccacattgtgtttgaggcgagtgcctccttggtgggtccgtcagtgcccaccctaatgccctaatgtctgtctctctgtcctagggctcccggggccggctgcggggtggcttgggctgggagtccagcctccgtcagcggcccatgccgaggctcaccttccaggcgggggacccctactacatcagcaagcgcaagcgggacgagtggctggcacgctggaaaagggaggtgaggcgccttctggcctgggccccagcccgtcctgcagaactggaaaaccagaagtgatgggcctcagtttccccttcaggctaacccttagaacttactgggagcctcttaatctctagtcatgatgactggttcatctgctccttcagcagatgcttattgaacacttactgtatacctggctgtgtactagaccctgggcgtatacggttcctgctctcatggagttgacattctgatgggggagacaggcagaacataaagaaacaaggggctgaaatagaagatagcagaggcctgctttagttggggtggtcaagacaggcttcttggaggaggtggcatttcagttaaggtctgaaggaaccgaagagctggctctgtgaggagtggggtcagggagagtgttctaggcagaggaaacagcaccagcaaggccttgacttgtttggcaaactgtatgccagggtgaaatggcaaaggagaaagggccagatgcagccagagaggcaggcggggctccacacatcagttggagacctgcagagtctgcccaaaagctggcttacttctgacaatactgggcagccatagaaggtttctgtgcacaggaaggatgtgatgtggatttgagaggcagcagtggagacagagaagagctttggggtgtattttggagctagaatagctagggcttgctgatggaccggcagggaggggaactggtggactcaaggaggactcacaggggtctggcctgaacacctggtgatggttgtgccatttgctcagatgggaagacccaggggaggatgagtttgggacaggtgggaattgagggctccgtgtgagatgccaggtgcctggagtctgggctgtagggaagtacgggcgacagaggtgggatttgagagcagaaccctggcatttaaatccatgggaacttaagggctcagcaaggggagaaggaggagagacgaagtctcagaacatgtccatgaaaaccccgacatttctgggccacatggagaggaggagtggcaggcagtagggactgagggagaaagcagtacagagcggtgtctggggaagcacggggttttcccagagggtggctgcccagccctagggaaagctgaattcactgagacatgcccatggcgttggacaacctggaaaggagctggtgactttatagagaagcttctgtgggggtcggggaggtgggaacagcccgtggagggcttcagccatgcagagaggtgagaaaatggaggctgaaagactgaggagggaaatcaactcgccacgcacaatttttgagctgtcttgtatgtttgattagtagagaactgggtacaaagagaagtgggtggtgacctagctgcacaggaaaagagaggaaactgccaccacgtggggcacttcacgtgaactcagctctcatttcgtctttaccccaggcctccaggggaaggcggccctgtttgtctgttcgcctttgtgtgagagctttctctagagaaagtgcagaacagaggccaggcgcggtggcttacacctgtaatctcagcactttgggaagctgaaaggaggtcaggagttcgagaccagcctggctagcttggtgaacccctgtctctaccaaaaatacaaaaaattagccaggcgtggtggctcatgcctgtaatcccagcactttgggaggctgaggcgggcggatcacctaaggtcaggagttcgagaccagtctgcccaacatggcaaaaccctgtttctactaaaaagacaaaaaattagccgggcatggtggcaggcgcytgtaatyccagctactcaggagactgaggcaggagaatcacttgaaccygggaggcggaggttgcagtgagctgagatcacaccactacactccagcctggacaacaagagcaaaactctgtctcaaaaaaaaaaaaaatacaaacaattagccaggtgtggtggtgcgtgcctatagtcccagctactcaagaggctgaggcaggagaattgcttgaacccgacaggtggaggttgcggtgaggcgagattgagccactgcactccagcctgggcaacagagcaaaattccgtctcaaaaaaaaaaaaaaaagagaaagtgcagaacagggtgggggttctggctgcttgattgttttcttttcctctgggatccaggaaggcagaaattactttcccggaagagcccggagaaagggcagcctgtctgaggtctgggaggagaggcacttacccctgtgcgtggaatgttgtgtttggggtggaaattcaggaatggggctcttctctccaagtcagtcgctgcactcctgggttccccgcaacccagaaacaggggctttgctttttagctcctggttctgtgagcgaagtgtttctgttctcatttagccctggggcaagaagcttagactatgacttttaggaaccggaagaactttcagaaattccatgattctcaaactctgctcccttgaagaagcagtatggaggcctgccctcagttacagtgaaaaaaagggttctttcctcaactcccaggaaaaattagatcatagatacattttctcaattttaggtctctactaaaatttaaaaagacttttttgggctggacgcagtggctcacacctgtaaccccagcacttcgggaggccgaggcgggtggatcaccttaggtcaggagtttgagaccagcctggccaacatgttgaaaccccatctgtactacaaatacaaaaattagctgggcatagtggcgggcacctgtaatcccagctacttgggaggctgaggcaggagaatcactggaacccaggaggcagaggttgcagtgagccgagattgygccactgcactccagcctgggtgacagaacgagactctgtctcaaaaaaacaaaacagactttgtaaaactcatgaacattttctaacatatgcagaagcagagagtagtgtaacgacctcccattgccatcacctggctccagcaattatcaaaagattttctagtaagtcttcaacccttggcatttgcatccccactcccaaccaatgaaggtagcagtgggcattattagaaaaaccaaaatgttgatttaatttaaaagactttagtacacttgacttgcaatgtggagatctccaaacaaaatatattttctgctaataacattattccttattcctatgctgtaattaaagaatccatgaattccagtacaagttttagaactactgatctcattttcagactaggggacttggggctaccgagttttataactgrccacaagctcccaatgaagaattgggaacaggactagaatggaattagaatttacgtttcctattccaatgtggggcccaggccctgactgtcacacagtctcctcctgggctatgcctggggttaggaaggggctagatgcaggtatcaagaatggggaaaacacaggtagctttcaagattcccaagtcgccctcagactcaagagtagtagctgttgctatcaggcctgttttctttgtttgtctgtttttgagacggagtttcactcttgttgtcaaggctggagtgcaaaggctggagtgcaatggctcactgcagcctccgcctcctgggttgaggcgattctcctgcctcagcctcccgagtggctgggatcacaggcacctgctgacacacccggctaactttttgtatttttagtagagatgggggtttcaccatgttggtcaggctggtctygaactcttgacctcaggtgatctgcccgccttggcctcccgaagtgctgggattacaggcatgaatcactgcacccggcctatcaggcctgtttttgttttttggtttttgtttttttgagacggagtttcgcacttgttrcccaagctggagtgcaatggcacaatctcagctcactgcaacctccatctcccaggttcaagygattctcctgcctcagcctcccgagtagctgggattacaggcgygcaccaccacacccggctaattttttgtaatgttttctaagtggtgtaacaacagcacagacatttctcctcttttctcagtctcattttgctctctgacatttgagcccttctgaaactgcctccctgggccttcccaaggccsctgcaggttcctccccacctccttcagctgatctcaagcggcaacctctgttagctgcatccccagatctccaccccccaccctctgccagtgttgatccactgaccccttacccaccctcctagatccaagtaccctcctcctcccaaaaaaggcacctcccctcctgacaaaccacccagccttcaggacccagctccagctgttccccaggcaatatcacttgaagggccagccagcgcttcctaatctcagaatgcaacgcctgcaacctttcattcagggcacctttactgagccggtttccagaagcctccacagctgagtgacatgtaagatactgggactaccagaggcatagaggattcctagttttcccatgataggatgagggctcatagcacctgcagaaagagctgccctgaatggggygtagacgaatgctgcctggggtcatctacgcatcagcaggggtggcttctggcttttgacggttgaactggaatttaggggagggctgaggaaggcatttcagagggaggaatacagcaggcacatacctctcgaggcacaagacacttgggcttttcaggaatgggagtttgttgtggtggtgcacagcgggtgtgggcagaaagcagctaggaaatgtggctggaaggtggggcaggggccagaaggaggagctgccaccagaccccaggctgcaccagcccttcccctaggctgtgtgccccacctggggggcttcttccctgggaacgcactccccagcttaacttccttctccttgcccacccttgttggaccacagttactgagtgagcctctcccagattacccccttcaggctttccctcccccaagatttaagacgactcagaatgtcacaaaatgaaagaaatggaaaataagtgaacggggaaaatgagacatttctgcagtccctgaggctgaagtgagaattcctgctggagctgggaaggaagttgttgtcttctgtctgttccatctcctgttgctgttccttcacctgcttactagtcctgtaaggactaagctctgttttaatcatgatcacaccctgccatagaacctccaatggctccccattgtctcccccatcatgtcagataccctctggctatttctcaagtcttcaacccttcgacctccacaatcagcccaccccactttcactacagtcctctaatagaagggtgtcccctaggaagggacattgccatgctccttccttccttcctgtcatcgttcctgctgtgatttccccagtccattcttcagggttgaggccaagagctgctgcctcctccaggaaggtttccaagatttctccagtccacaatgacctcttcccttccctgaatccctgtaaccctcactggggtttgtttgtttgtctgagacagtttcactctgtctcccaggctggggtgcagtggtgcagtctcttggctcactgcaacctccacctcccaggttcaagtgattctcgtgcctcgcctcagccttcccagtagctggaattacaggcacgcaccaccacacccagctaatttttatattttaagtagagatggggttttgctatgttgacctggctggtctcgaactcctgaccccaagtgatccgcctgctttggcctcccaaagtactggaattacaggcatgagccactgcactcagactgtccttacggttaatattacttagcactcaatcatatttcatcagggtatttttcactgtttcttatgtgttgatcacatcttcctctgtctggcctaatgcaatgggcagggagaacaggcccagtgaatacctgctggctggctaagcagttgggaggtaggtgaatgtgggaccacttctctgggaacatgagatcttagatttccaccatgacaagggcccacacacttgatttcgaggtggtttttccaggggtgctgacaggtgtacctggaggatggcatggggactggtatggacagcctccatgggtaaaggggggccagagtctcctccatcctgtattcctgccattctcaccaggcttctgagctgaggagaaccttccttggcctggcagagctggccagggctgtggggagggcagggtagggcagttcctcctcccaaaggaaggcactcccttagctcctcttccttctaattctcagagcaaaatgcactctgatggagggcttgagggttaggaagggcctctcgcttcattagccctccctgtagctctgcaaggcagatgagcacagagacccagggtcagtagctgggcggtcatctcgcctgggaagccactcactccagtttgtgtcgcggctggtggttttaggactcagttacagcacattgatggcatgactcgctcattaatctcttcaccccagccggattctaaattccgtctaggcagcgggtaccatgtcctattgttctaggatctggtctctttcctgcttccgacctgaaggtagggacccttgactcatgcatccttatacttattagatgcttaataatattgaatagtgataatgaaacatctgtgactggaacrtcatagtctctcctcccttccctcgccacactgagatacaacccactccctccgcccagggctgcccagcagatagcagagccttcatggaccttaagggttggctgctgtttactgcgacctttggaggcaagttcaaatactgccttaagaaaggtcccacttactgggtgtgggaccttaggcatcacttaccctgtaccccagctgaggttcctcctctgtggatggacttggctgtactctgcatctccatgacagcagcactcgccagcttgttttctgcctctacccatttctgcatttaagctcgttcaatacaggcattctgggcaccccctgcccccagggctggcatgtgggaggtgcagggtgaaagtgtgctgaatgaatgaacaattcttatctcagagttgtgtggacaacacacaacatttaaagctcctagcacagagctagcatataataggaactttataattttttagaaagtattttaaattacataagtattacacaaatacattcttgtgaaaaagtccgcccaaacttgccaccccaaaattttattttgagacagggtcctgctccattggccaggctggagtacaatggcatgatcatggctcactgcagcctcaacttcttggctcaggtgatcctcccacctaagcctcctgagtagctgggaccacaggcatgtgccaccacacttggctaatttttaaattttttgtagagatgggggtctccttatgttgaccaggctggctttgaactcctgggctcaagcagtccttttgcctccacctcccaaagtactgggattacaggcatgagccaccacacctggcctgaaaatttaattccttcaccagaaatacttgatgctatcagtttggtgtaacgtcatgattttttcctatccgtgtgtatgcgtgtaaatatataattttgcttcaggggttctttttttcctgttctttttacacaaatggaaccacactgtagtttcattttacagcttggtttttgacttccaataagtctgtgcaatctagccacgtaattactattatattccaccatgtggattcccatggttttatttagccattctgttattggtggccatttatgttgtttatgatattttactgtttagcattgcagcggtgaacatccttagtcatacctctttgtgcatctgtttctctaagacagatacctagaaagaaaaaggcctagctgaagggaatgtgcattttacattttatgacatctgccaaactgccctctaaaaagggcactccaatttatgcttctgtgaacagggtatgagaagacctttgccaacatcaatattttgctagtcaaatgggtgggaaaatagtatcttgttatgcttttaattggcatttcccagataataaggttgaacatcttttcctatgtttattggccatttgtgctgctgcttctatgagcttagcaaatgttgcctcctctgactttacaaccctgcagtctcaacagactgtgcttcctgtctgccctgaggagagcaggccatgaatgtccagaaggtcccccatgctgtgtcatattccatttaataagcagtcactcagcacctactaagtaaaggggccttgtgctaggggctatgggaaggaggagataataaggtgtgatctcctgggctttagtctagttcaggagaaatggaagtgcaaagtagaccagtaaaggctcaaaacaaattattagccaactgtatgggaagcagttttagagcatttggactggaagacattcctcacttatttgccstacctgaccttttgcagcgtggcctcaaaaataacatcacccttgaaggagatgatgatgtttggagtaggcacagcaagtatactttacccaaggctgaacaagttctagaggctcccatgacagcctgtaagcagtagtgacttcgagggctggcctttaccataggctactaaagttgccacagagggactccccattgtcctttaagtagatgggttggttgcgcaccagagtcttcacttctggggcacagagagaacagctcttagaacaacccctactttttagtggtgagaaaaaaagaggcagggtggggtaggtgactagttgctggcccagggccaactcctggccacagcaaagcctgaaccagggaaagggtgttgaacttcactgagcacctactttacatcaggcactatgccaggagcattagctttcaccacaatcctaaaacatattatctgcatttaatgtcttttttttttttttgagatggagtcttactctgtcacccagtctgargtgcagtggcatgatctcagctcactgcaacctctgcctcttgggttcaagcgattctcctgccccagcctcccaagtagctaggattacaggcacctgccaccacacccggctaattttttgtatttttaggagagatggggtttcaccatgttggccaggctggtcttgaactcctgacctcaggtgatccacctgcctcagcctccaaagtgctgggattacaggcatgagccaccgcgcccggccagaagtatttttttaacctgtattttgctattagaaaattaagatttatctaggtaagtaggttgcggccacatgggtatcctgatggagtggcccaatgggcaaaactagactccaaatctcgtgttgcttctgttgtgtacccaaatgactaacctacactcccagttttcctggtttcctggcttggaaattgtcatgaaattgaagaatgcatttagaagagagggagagagctggcccggctttccagcctgccgcatgctcttcccgcccccggcctgcagttgttggggctgctccccatgcctctttgccaggaggctcaggtccctttcagcctccccgaccacccctccctgctctactcatgtggtcctgaacccttgcccttgaattgctgttttttcatgaccatgtggatgatgttgtgaaactggattaagaaaatgttggaatgagatttgggaggcctggtttctcgtctcagcttctgcccctccttagctatggatgtgaggaggtctttctgctttcggcattttagtttcctggtttataatgcgacagaaatagatgagatgaccccagagattctaaaattccatcacggcaggttggggggtgagactggaatcatgatctgcactctctttattacctagattaccttgtacataaattctaaattaaatatttgagtgaattctcagacctcgcatatacgtctcttctaaaggcacatacgtgaagcatccttataaaaactctttttggccgggggtggtggctcacgcctgtaatcccagcactttgggaggcgaaggcaggcgtatcatgaggtcagcagatcgagaccatcctggctaacatggtgaaaccccatctctactaaaaatacaaaaaattagccgggcgtggtggcaggcacctcccagctactcsggaggctgaggcaggagaatggcgtgaacccgggaggcggagcttgcagtgagccgagatcgcaccactgcactccagcctggrcgacagagccagactctgtctcacaaaaaaaaacaaaacaaaaaactctttttaaaaaaaaaacctttggcccagcacagtggctcacgcctgtaatcccaacactgtgggaggccaaggcgggtggatctcttgaggccaggaattcgagaccagtctggctaacatggtgaaacgccgtctctactgaaaatacaaaaattagctggycgtggtggcacatgcctgtaatcccagctacttggaaggctgaggcacaagaatcgtttgagccagggtggtggaggttgcagtgagtcaagattgcgccactgcactccagcctgggcgacagagcgagaccttgtctcaaaaaaaaaaaaaaaaaaaaaaaaaccaaagggttgtccagcctttactgagcagatactgtgtgctcagtctttaagataccaccttgtgtgtctgggtgtctactatgttccaacattttctagacactaaggaagcaaatttaaaggcaagtcagaattctaccctcccctgtgagaggttggtaggtaaatgaatgaattgtgctgtagccagggcagggttgttttaraaatactaagggaaggactgtgcragcaactccctagccctgcctaagggcctcagggaaggcggtgcctagggagaggcagtgtaccgccattgacctgaacaggactgcttggcagggacagtgggggaagggcatggagtggggtcctaagggaggtggtcaaagaaatcctctaggagtttggagtctagagtgcctcaaagtttttcccatagcactgtctatggggctgacaaagcagaaaatataatagccaatgttctctctgctttaaaaaccagactgcttgtcagggaggccgtgggatgttcacatatggggtggtctgccagagccctctgccgctttattaagaggccagtacactcgttaaaggagttaatggacctcagtacttactactgattgcttagtaattcagtacttggtaaataaacatgatactatgctagtggcggggtagggggagaccaattggatatagtccctgtcccagaggcacacattgtcaagtggaggaggcaggaatgtttccaacaagcctcagtggcagtcagagcgtggggcttgctctgtgctcctgtgtaaagagcccaacatgaagcataaaggagcatgagagcagcttctggaggactccaggaaagcttcctggaggaggcaggcatcctttgagaatttcagtaagtgcaaaagaggctgggtgcagtgtaatcccagcactttgggagaccaargtgggaggattgcttgagcccaggagttcaagagcagcctgggcaacatggccagacccactctctacaaaaaaaatatttaattagctgggcatggtgttgtgcaccaatggtcccagctactcaggaggctgaggtcgaggctgcagtgagccatgatcatgccactggactccagcctgggtgacagagtgagatactatctcaataaattataaacaaacaaataaaaaagtgttaaagaggaggaaggcatttcaggaaaaggaactactgagggcaaagagaaggaggcatgacttctgggttgtttagggartagtaagagatctggtaactagggtgcaggggttagggaggatgggcaagaagagacagaactagaaagcaagatggtcacatcctcagtggtcttcctgccatagtgagaaatttaggcttcgttgtccagtggagagcaggggtggaagagaattggacacatagtttaggaagataacctggcaggacaataagtattccccagagagaggaagtttagaagcaggaccaggtaggagaacattacatttggccttgactgagggttgaggtaatgagaggcaaacttgaaggaattgctagaactggtcctggttggaggggagggaaaaatttgtctggtattgggagctgggctggggatagggttcattatctgaggtagagaatcttggaggaagagcaggtttgaggcaggatgatacagtgaacttttcattttcttatgtattctgatgagcagaagtttttaataaagtccaacttacccatttttttcctttattggttagtgtttgtgtgtgttatctctaagaattctctgtctaccgcaaggtctttaagatattttctcttaggagggggtggatttttgagctagggtttggataagctgcttttgagaagccagcagattggtgtcaatggggacaggttttttttttttttttttttgagacggagtcttgctctctcgccaggcyggagtgcagtggcacaatctcagctcactgcaacccttgactccctggttcaagtgattctcctgcctcagcctcccgagtaggtggggttacaggcatgtgctgccatgcccagctartttttgtatttttagtagagacggggtggggtttcaccatgttggccaggatggtcttgatctcctgatctcatgatctgcccaccttggcctcccaaagygctgggattacaggtgtgagccactgcgcccgaccccaggggacaggtttagtcagattccagggtggtcctcatggaggggacgcacaggcaggagggcagggagagaaagcacagaaagcagacctgctaggagaggaccaggatagggaggggcagggacaaggacatgggacttctgggagcaggtggccgggggtcaacgtccaggaggatttcctgaaccagttagaggactactgaacccccctttcacctatctatgcagccctttacttttacaatatatacatttctatttattttatttatttatggttttttttttttttgagacggagtctcactctgtcacccaggctggagtgcagaggtgtgatctcggctcacttcaacctccgcctcctgggttcaagcaatcctcccacctcagcctcccaagtagctgggattataggtgtccgcccccacctctggcttttttttttttttttttttttgagacaragtctcactctgtcacmcaggctggagtgcagtggcatggtctyggctcactgcaacctctgcctccygggttcaagtgattctcctgcctcagcctcctgagtagctgggactataggcacacgccaccatgcctggctaatttttgtaattttagtggagacggggtttcaccaygttggccaggctagtctcaaactcctgagctcagatgatccacccacctcagcctcccaaagtgctgggattacaggcatgagccaccacacttggccacctctggctaatttttgtatttttagtagagaygggttttcaccatgttggccaggctggtctcgaactcctgacctcaastgatctgcccacctcggcctcccaaagtgctggaattacaggcgtgagccatcatgccgggcctacgttaatttttgagacagagtcttgctctgtcgcccaggctggagtgcagtggcatgctctgatcgtagctcactgcagccttggactcttgggctcaagtgatcctcccacctcagcttcccaagtagctggaattacaggcacgtgccaccatgccctctgtggagccctttctgacttccatcaactccctgcgaccaccccgcatccttcacctctcagtccgcactccctcccaggccaactgcatggtgagtgtgtgtgtgtgctcccaggccaactgcatggtgagtgtgtgtgtgtgcaagtgtgcgtgtgaatgttaccatttttctgacttgccattcttcagtagcaactctacagatgcgacagctcttccccgttcctctttagtccatgaatggtgggcagtataaatattattttcacttgcaactcagatggattgaacaaaaacaggaataacagctcagcctcctgtatatttgacgctagatgctgttggaaaggcagctttgtggggcaaaaaaaaacaaaaattgagtgagcttgcttatatataccaaagatgctcttagacttcaatgtttctcaaagggtgagattgtgtgttacctcaccagaaccacctgggcagtgcattaaaaaggcacactcctggagcagaagctctgggacagtacttgtaggtttgattttctagccagcccccagatgattctggggcttactacagcttgaaaaccaccaagcytcagatgattagaggtaaaccaaatctggcacagatgagattcccacacagatgtattggtagatgcatttattgtatcgcctgcattggcggcgggggtctctctacacattttgtttaaacctgggccaggttaatcacgttgggaatytagtgatgtacccagcaagggtggtttcccaagctctccgggtaattgatagggcttgggttgccagtctgattgtggtaacaagcaaaggaagaagtagggactgtaaggcgggcagacctagggaacagtttccaaacagggttgggggggaaagaccggaaaggacttggtacaggaatttaaatgtttcctttcggatggagatggcaggggtcctgctgttttcagcaatagttaccgcagtgcctgtctgctgggctcctctggagtcttctctttggaccctgaaacttgagagggtctgcatgcctgaatctgaatgcggctcctttaggcccctccctttgacccctggagcctggagaaggggtgggggaagggtggggaaaacaggcctggctgttaaggtttaccaggttccttttggccacaccccccttagtataaacttaacacttctctccagggtccagtttctaaagcaaagtgacagcatcgacacgtccctaaagcaaacttgtcatgaagtccctcacctctcaaatgtgagtccctcctggcttcctttgattttatctgtaatatttagcagatacgtgtgattctattaggctagttaggaaaccaaggcccaaagaagctaggggttatttaaggtcttgtcatcagctgtaaaacaccctgctcagcgccctgctcagtgaaagacctggcatcccctcccagttgaatttcctggtaaggggcacctgagatccggtatcagtggggtactgctactctcccacccctgccctggcatctctgctccctggccccagactccgtcactggtagagctgggcagacccagcagttccaggatagcgggtggaagtgagcaggaaggaagagctgggtttgtggagaagccttccccttatggggcaggctatagggaaagggaaggcagccaccaaagctccagagcctgatggcgcatctattgggctgggacttcccagcatacaccattagggaagtgtagggttggctgggagagaacgagggagccaggggctctgggatrgaggtggggagagaaggggaggtgagggtatcagcaagagggaagttgggctttcctttccagcagttgggctcccccatcctgcatcttcctccttgatttagaagaattcatctagagtgtcagtgcaaaaagccccttaccactccccctccctaacagataccctaaggctgtgcttgtgcttttcattcctgccattcatctgccaggaagctcatgcagttacagatgccccctagatctggccattcctgtctgaaaaacctgggaggttgtgcccattcctagtttccgctctttcatcttcccttgagccttcctgccttgactgatcccagctgcctctgagttccttcggcacatgtagaaagcatccctaccacataatttaccatctaattgcatgctgtcttgaatgagggctgtggtttcatgtgtggtgggtcttgggtacacaattaggctgtgagtaacagaggcctagagccccatcatgtctactagctcttgcacctctttgcttcccttccccccagcctacctactgcaggtgctaaggactgactgacctgatccggtgtttaggtgagcttcaggcaggctcccaggataaagcacaattcgcttacaggttctaaaaccagactgctcagtgcaggggttaggggggtgcccctgcccgacagcatttgcccaaatgccgctcctctccccagactcagggaggaggttctggggcagggccsaggtttggggtgatggcatagagcccaaccaggcagcacactgcagttgccatggtgacccttttgcttttcttcaggaggatggatttctcttttagcccaaatcatctgcctgggctactctgagaaccagattcctagccccctaccttccacattctaccacagggggcagcttgtcagaggctttggtttgaaatcacagtccagcatcagacagcaacaggttgtgcttgatcagggagcaggtgggaaaggcccagaggagggctcacctgggacgcatgccccgagggagctgacctccatctccttctgcttcccctcctctctccagaccacttctctccagtgaattgctctgacctttcaggtgggctcgggcctctctaggcctcagtgttctcatttgtaacagacacagccagggtctccgtgtttccacacctggctagtattagaattacccagggaggttttaatagattcctgggccccaccttaagcccgctgatctacgtaggtagaccccaagaatctgtatttttaaagccctccttgggtgatccagatgcaattaaaccaaagtgaatctggggttctcctggcgaggtgattagcaaggccctcgtgaaaagaaaggaagttctgcctgtgctaaggattgactggcctctccgggcttccaggagcttctggagagccccttacagcctagtcttgtcaggaagcgggtgtttcctggtcatgccggctaagccaagaccagacccccacttctctccctccagagaagccaggagagagagaatgacaggaaggggggatgttgccataacaacaagctccaagcagaggcctcccttccaggggctggtacttcaccccagtcctggtggtttccatggagatgggttactgagggacagggggaatgtctgccccacttagagcatcagccaggagctgccaraaggcagaacaccgctaggtgcgagcctttggacccctctgctctccgggtgcacatctgacaccttccccctgcttagttgctctctctgcgactggtctccttagcaacaagtcctgctaactccacgctgttggcttcatggctatttttagcttcactgccagcagcccagtcctggtcatttgcttgcaacctccatatggattgcaagggaataggaaaacaaagattcccagcctcttttggtagactgggacctcgtagcaacgattagaattcctgctatgaaatggatccattccccaacttggaacttgggcagtggatttgggataaggttcctgagacaacactgcattcagttcatttttaatcctctactatgggcaagatgctctagcccacactgcttccatacgaaggtgaatgaggtccagtccctgccctctaggaatatttaatcttgtaaaggagaaagatgagtacacaatcaccttcgcacaaggcaaagactggcaggtcctaacagaggcttacaaagtacaaggggagtgtggcagggatggggtagaagataagggacagaagggaaagataagggacaraagggaaagataagggacagaaggggaggataagggtgaggggccagggcagcactgtcaaaagaactttctgggatgatggcaatgttttaaaatcagtgccatcgaattcagtagcccccagccacatgtggctcttggacacttggaatgtagccagtgtgactgaggaactaaattttaatttgtatttaattcaaatagacacatgcagccagtaactgccatcctggacagtgcaaggctagaggaactttcatggtggaggtcactggcggactggtgtagaaggatatgcagggtttaggtggtgaaagttgaaggggaggaaccttccaggaagaaggaacagcatgaggaatagcaagtgggcgggcaaagcgtgggcttcatgatatcacacggaggcctccagattcgtgggggcctagaatgtcacgcagagtgttgactgattggcattgaggcttttgagctgtaggtgggaggaggacgggttcagaacagacatccatcctgacctctctttttgtctggatcaggtctccctggtcttggggttggtgggaatacgtgtggggtggaaatacgtgtgcagtgacttcatatgtgttgctttgcagatggctttatagggaccatggcttctctgattcagagtagagagactcgcatggtaaatgtcctggtgggatgacagcaacatcatctaccctcatcctgccggaactggattttatgacagagcatgccacagagcactgaactttgagtaaaacgtcaggcatgagctccgggcgttgctgctctttggagaggtatcatgatgggctagtgtctcgtctcaattctttgaggctggaaagtcacattaacatacttatgatcatgactcttcaatgacccaggagaatgatgcaccccagaatgttagatttaccaattgataacaggacatgtccttgccacacaaatcataatgcttgtcctgctgttttctggcaacttactggtatcagagtcattggaaaatgtaattaaaattggaagtttgcttgatgaatacaggatcagggcagagaggtgtccttcagaggtatttttgtcgggcttargaggcctatgggatcactgttgtctgcccaccaaacaggaactgtgctctcattctcaggtcactctctccattggaccacactggatacttcctttccagcacctcttttaggctcttgacatccagcatattttcttctcatccaggagttcctcctttcaacatacttttataacaaatccaagaacatggcttattttacatggtgctgctatttgagtttggctatctttaactcaaacaaaagacctatctggtaaactaccagggaggtttactttggaagctcaagagcatgtgtgacctgaggatccttgaagattgccccattttagtaaggggatttttccttttactaaaatcacccctgctctagatcttggggtctcttctgctttggggtctgactgtgcattgaccacaaagaagacacatctctgtttaagcgactcagtctagaaaaggcagtgtttcctgtctgcatagttacaggagagggaagaaagatgctctgggttgttaaggggacacctttgagcctaggcttccttttgcttgttgggaagttgtgtggaagaggtaggatttgactttaatgttaaaggatgagaataaggaagtttgacggccggagggaacagctacctaatatgtggccaagagaaagtgaacagttctggccagttctgacaccttgagtccttgctgcacgcacggcatcattgcagtcttatgtcccaagaccacagaatgtggagtctaaggtgtttagccgcattataatggaagagcgggtatcgtacatgagacagtgtctgcaaaaggccaccaagccagaaccagaaacttcttttgagaggaggcctgaagtaagttctcaggcccgttgaccggcatggatgcagaagaggtatcagtgagagaagcagcgaagcaagtcatgctgcattccctaaaggttgggagcaggcaagagggacaaattctgggcttctcacttctgcttggggagcccctggaaatgtgtaccaggcaaataccttagttgggttgaaagatgggttggaacagaagagggcctgtgtttttgtttgtttgcttgtttttcgaatagcttcttttcctagctgtatggattctgggtctcagggttgggggggagtctgtacccaagtcttctaggtagaaggctctctggtttggggtccttgctcttcagggtttgcttgctctgatggccctcagggggagggggggctccctcactgcacatctcgtgacttcattataccagcacctgtatgtcccaggtgactgtggctgggagccaggcacctagagaattgtctcattgtcattaggagatggtggcgttccatggccaaagagggctgatgtcatcactcgttttgcagatgagacaacagatttcttgggggttaagtgacttgtttaaggtcatggtggtggaaacagaactgaagtccagatcttttttttttttttttttgagacggagtctcgctctgttgcccaggctggagtgcagtggcatgatctcggctcactgcaacatccgcctcctaagttgaagcgattctcttgcctcagcctcccaagtagctgggattactggcgcacgccaccacgcctggctaatttttgtatttttagtagagacaaggtttcaccatgttagtcaggccggtctcaaactcctgacctcatgatccgcctgcctcagccttccaaagtgctgggattataggcgtgagccaccgcgctcggccaagtccagatcttctaacaagtgccgctgcccaaatagccctctgctgtggggtgcattttcctccatttcctcagttcttccttctaattcatcttgccaacggcaactaggctgatttttccaaaatactcattcatcttgtcagaaaacctgcggttattcttccctgctacagaatatacccaaggacgcacctgaaggcttgccattaccttgccctgtcgtgtactgggagggtggaggtgggcgagggtctcctccctccccagcccggcagctcttgctcatcctacccatctcacctcattccaagtccgatccagcctccaggcccagtcggctcacctggaactgacctctgacctcttttgtcatccatgccgcccatttttttctacttggtatttgtggcatagttacctttacatatgtttgttttacagtgatcctttcatatttctccaagtctagtggaatcttcaacccctcgagggcagagccaacagggtctatttctttatctgatcctacagccaacgtaatggagggctgtgggtggggactgcgtctgccttgggggtaggtgcctttgttcaggaggaggaagcttgaaatggcggaggctgcacctggaggccgcacctggaggccccaggagaggagtcaggtcttctcgatctgcagatgtttgagcctgggaatgaaggaattgctgaactttctgaaggagcgccctcgccgcgaccaaccttgcaaacaggaaaatgagaaatccagggaaggcccagagtgacgcaggggccctgggactcgaagcctgacctcctcacgccgcgctttttgaggcccccccgcttctctattcacctgtagtgtggaggcgggagaccccccaaacaatccccgatctggagcgctcccaatgcctgcgcgcgcctgctgtcactctccgtctgtgtgctgagttttcctacagcttcctgggcctcctatctgtaagctttttctttttttttttttggttgtgcttcagagaaactcacttttcacaactttctcccggctctcccaggccgtccgaaagctccggcttgctttcgcccggacccccggctccctccgggcaggcggctcgggagcagccccttccctcccctcccggccccccggccccgcgctaatctcttccagagctgggggaggggccaggcggtcttcccgaaggcggggcgctccctgcagcccggcctgggcgggccctgggaacgggcggggaacggcctcgccccccggccccgcgcccctcggaccggagaagaggggctggcccagcgccagcgtcggagcgccggccccctccccgggccgctcgcagccaaccaggccctccagcggggcccacgtgacctggagtcctagacaaagaaaatgttccctccctcccccccgccgcccccctcccctcccagtggccccctccgcccccagccccatcgcccccttcccctcccccaagacgggcagctacttccagagcttcagggccgcggctcacacctgagcgcgactgcagaggggctgcacctggccttatgggtaggttcctggacggagccccggggagaccgggggcggggaggcggcagggccggtgggaggatctccgcagccctccgggtttgaaaagagtgaagtatgcctccccggcccgcagcagccgcggcgtcccggcctggcccgagttctggagatgctgacttagtgctggcccgccgccttcctgcccacgagccccaaggccccactcctcgagggctccagtggcacctggcgccctcgggggacaggaagagcagccggccgggagcccgggcagtggtaactgcaggctggggcacgcggagctggtggcccaggagttgggttggaggcagcttcagctgagctggcagatgggtgcctggcacttccctggtgacctgcgtttctggctgggggaccacgcggtcctcagggccctgccagcttgcggcctcttaagagggacagcttcctctcctgcgagttcctggaagcctccaggcaggccgccagaaagaagtggtggggggcgggagagcacggtgcgaccctgacagggggccggcctgtgacaccagggtagcccaaggccgcatgggcttgggggcggtggcgctcagacctctgacctttggaatgggaagcgctgcagtcgcagggggaggtggaggcgggacaactgcctgaggagatgggactggaccggaggcagtagtcaccggagttcccggtggctttcccagkctggacggactccaggcccaggggcttccgtgagccagcagggagtggggaatrgtgtggtgtctcttgaatgccgcctggtttctccgcccccctgggggtgagcagcccgcagcccaaatgcgagagcctcgagttcacccctgtttctcttattgtttgcctggggaggaaggcaggagtgcagagggaaaggggtgctttccctacgccccagacaggcctagtctagtgaggcccctcccccacccagctccggctgccccttcccctttcgtcaggccccctgctgctcacccacccccccccccgcttcttccttcccccaccccactgccccagtcctgatggaggccccttcctcctccgccagcccttaccgggccgggtgcgtgttctgcaccaagtgggctggggatgctgaacagctcgcagcgcggcatctgacaagctgggggaagttgtgggggaagaagaatgttcaggaactcgctgtgaaggggctgagagacaaaggggccgtgggggagtgctgagggtggtgtcaggcacgactcctagacctggggagccagaggaggagcccagcccacctgctgctgccgctgccaggaactgatagcgggtcctttccccttcccgcccactgctacctgcacacctcgtactggctcaggggcctcgccacgcctggaaacggggtctttggatcatccgaggcatcaccctaggtcagccacccatgcctgaagcttgagaaggcgtggtgggcgaggagcagcggcgwggtgtgggctcctctgcgagggtagctgacgcagctgaggatcccagcaagggaggcaccctcccccatagcggggtccacacttcagtgcaccttctcgtaggggaggaggcgatggctaattgatagtaggaaggggagggcagagttctggccaggtgagagtggggctagggagcgatgagcaattactccacattcttccacccccgcagtccgatccgtgagctcattccgccatccatgagctcattttcccagctgtttgggggttgggggcaaaggatgcattatcctgttttagaatttgttgagtcagaggaagaactaggacttaacatcttcagtgtttttcggaatcgccataagaaacagattggtctgtggcttggaggcaaagacttgaagactcagtgaaattaaatgaatctgtaagacaatacattggaccactgagcttcaaacaaaggttcttaacctgggacccttggatctggggggtccattgacaggctttgggagagtcctgggaatcattggtccatatatacaccagatttttaaacaggtcagaaaagctttccagaaatccttccgttcaggtgcctttttatgttggagcaactcctagaaaggactgctccaaagtcagctgctggttgtgaggctccgacaggaatgtagaggctgcaacttcagattagagctcttcttcatactccaggttgcttgctcatcctctttacccttgaggatgggtttrcattcgcagctctaggcccatgggggagctcttttgaaaggcatgtagaaaatggggttttctcccctctaaatctggtatggtggaaatgggtgcaaagccttgaagtcagagggccgtgtttcctagattcagtaaaaggctaatggttctcagagctaagtatcaaggatttcattctcctttgtagggatcctggagcgggttgtgagaaggaatgggcgcgtggatcgtagcctgaaagacgagtgtgatacggtgaaaggatggaggctgtgcaatgggagaataactggggtttggcttattaatttgttggtgggatggcagagagcacgcctggtctatagtgcctgctcagtaaataactgaatgaatacatgtatttatggatctgaagggtgcacatagaaggggtcgaatctggtaacaatacacactgggtgtgatccataagaactccagcatggcgtctgagcatgggaacagacaggctcttggggagcttcctatggtgtttgagcatgtgctggggggagatgggctctttaaacccagagcagtgatttcttcgtcagcagacatcacaaaactagaattgtggcctggaaaccaggaataggaaggattgattgcccaggggaattgtggagaagaagagagggtcccccttgctttttaaatttttggtgacagggtcttgctatgttgcccaggstggtcttgaactcctgggctcaagygatcctccctgctcagtaactgggattacaggcacatgcctggctgaagatcctagtcttgattaagaagataggagagggtggaaccaatatctgtgtctaaacaatagtgcctgattaatatttggatagaattaacatctccataggtagggggagggatagcattaggagatatacggtataatgctaaatgacaagttaatgggtgcagcacaccaacatggcacatgaatacatatgtaacaaacctgcacgttgtgcacatgtaccctaaaacttaaagtataataataataaaattaaaaaaaaaacattaacgtaggctagacacagtggctcatgcctgtaatcccagcactttgggargctgaggcgggcaaatcacctgaggtcaggagttagagaccagcctggtcaatatggcgaaaccccatctctactaaaaatacaaaaattarccaggtgtggtgktacatgcctgtaatcccagctactcgggaggctgagacaggcgaatcgcttgaacctgggaggtggaggttgcagtgagccgagattgcgccactgcactccagcctgggtgaaagagtgactctgtctccaaaaaaaaaaataaataaataacatttccgtatcatagggtaggcaaccgatatgctgatgagattgaggaagattagatctgggaggaaggtttcctaaaaggcagaaaagaaggctggaattgtgtgacttgagttcacctctctacttcaagtctttccatttttcacggcaaggcagctggttggctctctccagcccttgaccttctgtcactgttccgggttttgacaaacatggtccccttgagtgtcaggtggccttgctaattcctggagaggtcaaggtgactttttgttttttgtttccccaggctgagaagaaagccaaggtcattgcaggaatgaatgctgtggaagaaaaccaggggcccggggagtctcagaaggtggaggaggccagccctcctgctgtgcagcagcccactgaccccgcatcccccactgtggctaccacgcctgagcccgtggggtccgatgctggggacaagaatgccaccaaagcargcgatgacgagccagagtacgaggtgagcggcttcttcaccagccgtggccagctctttccgggggccttccactgccagctcctcccgtcctgctctcctctctccatctcccacgggccgctcgctctctccacctgaccccgggcctcttcgtctccccgattttgctctgtcttgcctcattcagatggagctccctcctggctgtcctgccccccagatgcccagggctggggttgccatggggggatcagggtggcagggcctcgtgaccactgtgtaatgatttctgctccttggggctccaggacggccggggctttggcattggggagctggtgtgggggaaactgcggggcttctcctggtggccaggccgcattgtgtcttggtggatgacgggccggagccgagcagctgaaggcacccgctgggtcatgtggttcggagacggcaaattctcagtggtaagttgtggggtttggcagtagcctggggtgggggaaggttcttgatcccagggcctgtggttttggctgggggcagtctggaattggggtgatggaagtgggttctgctcacccctactctgcctgtggtgggtggaagaagctgtagggataattaggttgcacctgtggctcagagagctaggatgctggcccagttttagccttccaggaacctattcactagaattcctttccacctgcactcaggtacttccctactcttggtctggactcctctttgcatcgggtaattatttatcactgtatctggtcccctccagggctgagactgactctcgaggctcccagcccctgccagttgcaaggcatggggtgggtgcttgcaagtgtaagcctcggcaaacaaggcctggcttgtccccccaggtgtgtgttgagaagctgatgccgctgagctcgttttgcagtgcgttccaccaggccacgtacaacaagcagcccatgtaccgcaaagccatctacgaggtcctgcaggtgagtntccctgctgggagctcggaggaggagcctagagcactaggaggcctggaagttggagtgcaggtcgggcttgagcagaacggaggcccaggaggcagcgactcctttctctccacctcgctcgcccgtatgcacatcccgctcctcctcagcggttcctccccatcttgcctgtgccaccctcactactcagagtctggccttgagcctgacccatctgccttccagcctgtcctgacaaccccaaccctggcgtgtcaccctccaggtggccagcagccgcgcggggaagctgttcccggtgtgccacgacagcgatgagagtgacactgccaaggccgtggaggtgcagaacaagcccatgattgaatgggccctggggggcttccagccttctggccctaagggcctrgagccaccagaaggtaaatgagggcacccagctttctgggacccctgcccgccaggcagatccacaccagggctgggaaagccatgcttagggagggctgccaaggcctccacagaggggcccagtgggaacagccggggtctctcttgccctggggtcaggacttgaatgacctgctctctgttggttggctagaaccgtagagttgggaggtgggaacaagttggagaccaggccgcaccccactgtaaggagggtgggggaaggggctggagtttcctgtcagcctgtaactgaccttggcacctgctttcctcctccagaagagaagaatccctacaaagaagtgtacacggacatgtgggtggaacctgaggcagctgcctacgcaccacctccaccagccaaaaagccccggaagagcacagcggagaagcccaaggtcaaggagattattgatgagcgcacaagaggtagttggcctgcttctggagagggtggcaccaggaggcctgcatccgaggagcaggcgcggcctcctctgacgccagctctcctccccttgcagagcggctggtgtacgaggtgcggcagaagtgccggaacattgagggtaagtttgttgcctgggaactctggcactcctagtgtggcatggggcagagtagcagaggcacttaggaaggtttgaatgacatgggaccaggggccacgtcctgcgtgtcacaccaccttcaccgtgcttcgtgcactgtctgtctttctggtgccatgattctgctctcctgtcaatggcgtgggctggtcttcagggtgtgggactccccagtggccacagaagggcagcccctcttgggtgtgactgaactcacctacaggtcccctttcagcctttcacctttgctcacctctctcatcctggggctgtcgccctcagcctggtgctggtggatctggctcaggaccctcggcctgggaggattggggcaggggtcaggacttgaggattaccccgggaatccctcctgagtaacctggaaccagggctgcttctcatgagcaggtttctgtcctgctgtcactccatccctgtttgtggatggtggcattggtgctctgagatgatggcgttcgagactggggtcacagtgcctcccttttccgtggggcaccctggactcttttctggctgccgctctggcacaccccttttttgtggctggtctggtgctgggctccggcccggggagggagaggcccttcggtggtactcaccccatcccctccctctgctttccagacatctgcatctcctgtgggagcctcaatgttaccctggaacaccccctcttcgttggaggaatgtgccaaaactgcaaggtaggagcacacccacccaggagaggtgccgttgaggccggcccttcggccttctggctgactgtgtccaccgcttctgggcatgtacagggtgacacccggtgtgcgtgtgatgtagacttcagagcttcctctggaagcagagtcctgatgacacgggcccttgggtttcaagcttttgacttgctctcatttttctcctctgaaagattctttacctctctcaagccccattttagtccccagatgtggggatgggagcagagcagcggggacaagctcaggcagagtgtagcagggttgccgtgccctggggagcccaggagaaaaacccagggctgcaggaaggcccaaggtggtggtgcagccccctccctggccttgttctcaggctgctctttggttctgtccatggcggtgcacaggcagatgaggtttccccttcccagatctgcagctggggcctgaccctggctaaggtggtggcggggtcatgtcttcagggcttaggctctgtgaggccaggtgtggagcctcccttcgtcctggccgtcctgggacccgtcctggtggtttctgacccttcccgctgctgtctagaactgctttctggagtgtgcgtaccagtacgacgacgacggctaccagtcctactgcaccatctgctgtgggggccgtgaggtgctcatgtgcggaaacaacaactgctgcaggtgaggctgttgtggcctccagtggtctccttagctgggccccaggctcccgccgcccaccgcctcccctcctctcccttccccacagaccctccaccccctagccatgctccagacccggtctttccattccaggtagcacaccttggcctccccggaccagggctgagagtctcctctgctcactgggtctccttccaggtgcttttgcgtggagtgtgtggacctcttggtggggccgggggctgcccaggcagccattaaggaagacccctggaactgctacatgtgcgggcacaagggtacctacgggctgctgcggcggcgagaggactggccctcccggctccagatgttcttcgctaataaccacgaccaggaatttgtgagtgctgggcctggggcgcggtctcgagctcccttggctgagccttggttgtggggcctgagctgtgcgcagggtgtgtgggtctaggagcctggctggagggccagcgctgggtgggagcttgggacaccgmtgggcctgcatctgacctgttgtgctcactgcttaggaccctccaaaggtttacccacctgtcccagctgagaagaggaagcccatccgggtgctgtctctctttgatggaatcgctacaggtgaggggtgcaggcccaagaggtgctggccgccttgtcccaggatgggggagccaggtgtgtgggcaactctggcaaaacgaaatgatggttagcttcacagctgttaaaatattatcccaaaggggaagcttgtgtgtgaagtggaaacgtatgcagtccgtggacttagatttgaccaaaaataaaaaagtaaaacaggtggtaaagcagcctgcctgctgggcgcttccttagtaaggaagattcagccacagaggccgagtgatcattagtcagattcacagagatttcacagagcctcaaaggacagattcagcaagacagaaacatacacagttctgttgtgttttgattatacacaagatagtctaaagaagacttatttaaatcacccattatccttttattaatattttggcatatgtccttttcagatttttttctgtgcgtttgtgtttatataaccatacatccatagatagataaattaagtgggtagtgaatgcacacggttttgtaacttgccttgcatttattatattatgattgctttttcatgtcaagcgatataaagctacatttttttttttttttttgagacggagtctgttgcccaggctggagtgcagtggtgccatcttggcccactgcaacctctgcctcctgggttcaagcagttctcctgyctcagcctcccgagtagctgggactgcaggcacccaccaccacgcccagctaatttttgtgtttttagtagagacggtgtttcaccgtgttggccaggctggtctcgatctcttgaccttgtgatccgcccacctcggcctcccaaagtgctgggattacaggcatgagccaccagacccggccaaagctacattctttatttgtaagtgttgcgtaaggttccattgagtcaaagtgccgtaatttatttaacgaacccctattaggtcatttactatttttttaattattattataagtagtgctgtgacaagcatcctgatagaatatatacttgaaccattccctccttaggaraacctttaggagatgctgggtcaccctgcaggcattgtttgcttcatgtgactctggacactgcagaaagcgtcctaggagattgtgaagacacatccacccctctgccctgcccccccagccaagggcttcccggcttttaagaaaggaatagctcttcttagaattcatgtctttggccagagggagataggcagtctcaacccagggaccctggttagagggtgaggcggaggggatggcttccccggccagatgtttgtcttctgttctcagctccatgctgctcttctgtaaacctagagaagttcatttacagctttttgtatcccagactggaaccttgaggccttcttaaatcatgtcacaccccaggaggctgtaaaagctccttggctgggggacatgttgggagcagcagaaacagtgccgtaccctgtttctcccgagaccctctcgggatctgctctgattgtttccttgcctcagttcggctagcatttctggagggggagggatcgtggtaaggaaatctgtgtggttagctcgggggaagcacaatgaaggaggcctcctctgtctggaagagcctttgcaatccacgagagggctgagtgaggaatggaaactgctctgatggggaggcaagggatgcacagagctggggactcatagcggagggggcggtgattccaggggctactgggtggggcagggcatttatgaaacctttgtggagcagggaacattcaggttgagtcaaagggtggggtagaattgtagcaggaggtgataagagggtatggaaggaccaagttgtagacggacaacaacaaagaaaaggcccccaaaaagtcagctgtgattcttcctggatcctggaaccatgtactctccggtcagttttctgcagctttgactgccttccagataggccaaacgaggcatgagacagagcctcgatgtccttactatggatactccagttggatccagaaaggatttaaggcatcttcagggaaaagataggacttgggcctacagctgaccccatgggtcctgttggccagcaggctcacctgccgagaccagggtgccagggagatggctccaagtaacggtgctgtctgctggctggtgcagggctcctggtgctgaaggacttgggcattcaggtggaccgctacattgcctcggaggtgtgtgaggactccatcacggtgggcatggtgcggcaccaggggaagatcatgtacgtcggggacgtccgcagcgtcacacagaagcatgtatgtccatgctgtggggcgcagcccgtcttcccctccctgcacactcagcacctggaggcagcccttgcctcctttcattttgttcatttgccctctttctcttcaccctttgccccagcctctttttctccttatcttccatttgtcctctgtcttgagagggtaaagggcaaattgaaatgggaatttgggctaggcatggtggctcatgcctataatgccagcactttgggaggccaaggtaggagaatcccttgaggccaggggtttaagactagcttgggcaacatagtgcctacttgagctctggctactccctgggctggtttctggacagtttctagtagagctctttggattagagagaggttcctgtcctcccaatacttttggcaaatagctttatcagcttccatatctgggaggctcaggcagggtcttcccttaagcatgactacaggccctctggagtcctgaagggcaactggaggacattcacatggcccagacaccctgcctaagacactcagcatgccaggtaccttcagactcagccrtccacttgggtcaccttcccagtgggtggctgtgttgcctgcctgggtgatactagtttccccattggcctaagaaatgatccaacttggtcccgttcttgtttaggacttgtccatggttgcagctagggtcgtgagcctgcagagcagctgggtctcctctctttcgtgtcaaaggacttctttgccaagttcacagataatttctctttcttcctgtctgcctctgtccctggacagcaggcccatcacgttgcctttatcctcccagatccaggagtggggcccattcgatctggtgattgggggcagtccctgcaatgacctctccatcgtcaaccctgctcgcaagggcctctacggtaggtaccatcctgtcccctccacnttctcagctggtgcttccgcacataggcttcctccttggatatttctgccctgggacagctattcccgatgaccctgtcttcccgtgccctccccgtgcccgagccacaccactgtcctatgcagacagccccagctgatggctttctcttccgacctctcagagggcactggccggctcttctttgagttctaccgcctcctgcatgatgcgcggcccaaggagggagatgatcsccccttcttctggctctttgagaatgtggtggccatgggcgttagtgacaagagggacatctcgcgatttctcgaggtatagccagcaaccttggtttggccagctcactaatggcttctaccttggactgctgcttcatcctgtctcatctgcattgtggagctggggactggtgacttctgctttgcaaggggcctgtttgggaagccccaggcttcctggatagaaagggaggaagcagggttagaggcctacctcggaaagaaccagtggtctcactctaagaggtggcattgtgggtgtggacctccggggttgaaggacctgtcactcaatcaggtggggtgccagactcctggggttgggtattctgtatggtgtttgttacacaccaggatctttgagaggacaaaatcagttttccctgagcaagaagggcctatcctcactccctggtaccatgacaggcacctgagaagaaaacaagacttagctcagttttcattccttatcatgtgagtccccgtttaaccctgagccaagtctgagccgcgtgcagagggcttctgctgccagaggcgtgcttggagtggcccttctgggagcttgagcccacctgtgctcctgagtcttggggtgggtcacactgtgagctggtgttctgactgtaagtgtgagcaggcgtctgtttgagttctaatcagggctcatggtaaacacacccatactcgctggagcctgggctctcccagcctctgggtagtctagagcagcactgtgcaatatggtagccaccagccacatgcggctgtttacattaacattaaccattcagctcctcaatcacattggcctcattttaggtacaaaatagccacctgtactagtgggctagtggccactgaattgaacagtgtagaggacaacccaccatcgcagaagttcatttggacaatgctgatctagaacgttccagtgacagcttgtggaatgtggctaggtgtaattccagcttctcctggaggctgcaggctagcccagtgtgtggctcctgagagagaagtaagaggctttgaggctttaaggctcgaccccagcagcatgccggcgctgtttcatgctcctccttggctcatcttcaaaccgtctcctgttttgtagtccaaccctgtgatgattgatgccaaagaagtgtcagctgcacacagggcccgctacttctggggtaaccttcccggtatgaacaggttggtgaaagctcctgggcctggggggctgtgggctgggactgcaggtgggatgacccatagtggggaagcccctgagccgggccctctctggccggcctctgctgaatgactagctgctctgccatgttccttatttccttttccttgaggaggaagaggagtcagggtatagaaaatactcgtctgaaaccaacaactagtggtcttaaagcaggacctttaaaagtactctctttataccaaagaagagtcctgtgctgctgagttaggtagttggttttctgacattggtgatgtgtcccgagccctctggttcttagattctcctgaggcaaagccatggggcatggctttggggctgggaaggggagttgtggccacagcctgttccaggagagggaatcttgcagcggctgcatgcaagttcagggttctgcttaacttaattttactaatcacacactttgttggcttcaggtccttttttggagagattttcttcagttaggttacacagataaagattttaatatctaggaatgaagaaaattcatttcatcagttataaaactggcattataaaaaggctttttaggcgaaataaattgtccagagttggcaattcaaaagcatgctgagagccgctcagtccctgtccattgtggagggaagcgttttccagagtgttctgagtcatgggtgttaaacctccatggtgggctgcttggtatacttggtataactaggagacatcatttcacctggcctcggtcaaataatctccctccttgctattcccatgaggttgtaggaccttccccatctcatacatgtttggtagagttgctatcgagggcttgttgaggggaaggagatggggcattggggcagctggcctgaaactgtcccccgagagttcccaagatacatgtgcatattgggaaatggatgggctaatgaggtccagtattttcatggaaccactcagtgtctcccgacagaccttggtcctgtgggatttctcgcctgcttctttcaactctaaaatactaaactctgagcttctaggaggagcagaggtcctgcatgcagggccgactgggcagtgcacgcataaagagtcggggacatctgtcgagcacctgatttgactgcaggccccgtggttcccacactgagatcctggagccagtgctcagggaagccttccttaaatatccttacatgtcagaaaaggtcagcgttgaaggggacagccagtcagttatgtggcctgcaccctgagaagtgacatatttaatgtcacagaatttttggtctttagggaactgcagaatttaagtctggttttttttttttttggagacagagtcttgctctgtcgcccaggctggagtgcagtggtgccatcctggctcactgcagcctccgcctcccaggttcaagcgattctcctgcctcagcctcccragtagctgggattacaggcacctgccaccacgtctggctaatttttatattagtagagaccgggtttcaccatgttgatcaggatggactcaaactcctgacctcaggtgacccgcctgcctcagccttccaaagggctgggattgcaggcatgagccactgcgcctggcccagaatttagtcttttaaagcagtacatttaaggcttgcggtttgattaatttcatccagtggacacacccgtgtaacaatcaccacaaatcaagatacagaacattgtcacccccaaagcttgcttcgcagtgggacgcttaaagctcagtgtattttagactaactgatgtaaagatagctgtgctttttttttctttttctgctaggtgttatctgcctgttcacaatttgagaccacttttgaatttacctttaaggattaacgcttggtggatttgtgtctttgcatggctgcagtgtgtgttcgtgtgtttgcggggagtttgaagagagttatgacgtgtgtgcgtsatttggggaaggggctcttaccctgtgaactagtggctgctgggggagggaggggagtcgtgcagctggggcccttcccgctgttatccaggtttctgttgttacagtctctcttctgcctcctaggccgttggcatccactgtgaatgataagctggagctgcaggagtgtctggagcatggcaggatagccaaggtcagctccagcgtctagaacctckgctggggggcagggagaaggaagggcaggatgaggtggagcggtggccagggccttgtcccgcctgcttctccagctagtgtggagaatgcaatttaggagacggtgcagggtcatgcagcagggcagccagaggagggcccagggctgctgrccttcagcccttcctccctggtgagtgtcgcccatcacccccggtagacactgaggagtctttaccaagacctggttgtgctgtggcttttttttcatttttaaattttttggccaaaacctattacaaaagccctcaaagcagcctcctgtgatgtggaagctccatttctctctggagctggaatctcccggagtgactacctggggcactgggttctgtgtcagcaggttccagcattcagaaccactggcagctccgagggcatctttgagcccctcagtaacttggcatcctttagcctacaagttactccatctctgaaagaactaattctttggaagacttggaaagtacagtggctacagcttctacttctaaagtctgtggctaggccgggtgcggtggctcacgcctataatcccaatactttgggaggccgaggcaggcggatcacctgaggtcaggagtttgagaccagcctggccgacacggtgaaaccctgtctgactaaaaatataaaaattagccaggcatggtggcgggcgcctgtagtcccagctactcaggagtctgaggcattagaatcgcttgaacccgggaggtggaggttacagtgagctgagatcgcaccactgcagtccagcctgggtgacagagcgagactmcgtctcaaaaaaaaaaaaaaaagtctgtggctagatggatctaagattggccaggtgacctccaagtaggaagaaaagtgaggctgtggggtctgtggaggctcctgccctgcgaactctgctcactcagagccatacccagccccctgggtggaccaggccctgtcagggtttggcgagtacctggcatatttggtagacgcatgaccagtgttggctggtgaatgaattcgtgcttattcctcttttctcctcttcatctagttcagcaaagtgaggaccattactacgaggtcaaactccataaagcagggcaaagaccagcattttcctgtcttcatgaatgagaaagaggacatcttatggtgcactgaaatggaaaggtacccgggttgtgctggcatctggctgcrgtgtggctgttctgattgctgtgcttgctgcgggggtcctctgcctttcccacctgacttgttttccacaaacgtcctgggaacagtgggttttatcaagcatttcccaacatggcagactcctggggtggactcctgacaccccaggctcctgggtattttaaggttggtcccaagtaagaggagtctaggggccaggagcagtggctcatgcctataatcccagcactttgggaggccraggcgggtggatcacctgaggtcaggagttcgagaccagcctggccaacatggcgaaaccccgtctctactaaaaatacaaaaattagctgggtgtggtggcgggtgcctgtagtcccagctactcaggaggctgagacaggagaatcgcttgaacctgggaggtggaggttgyagtgagccgagattgcgccactgtgctccakcctgtgcaacagagagattccatctcaaagggraaaaaaaaaaaaagaggagtctaggaaatcccctgctgccttgtctcccagagaccctgctgatcccccagggaaccactgcagtgacaggaccttaacttgtggtgccaattttataggtcttttgtaaaccaagccagcatagggccaggcagacctcgcagcctcaacaccctgatttgatgcaaatgggactttcggggctggatgaccttcttgttctctgagtgtaactaggatttagccagacaaagagaccatttacacaaacaaccagagcaaacaggaaatccttcagcttctgaagtcaggcaggagttcggctcctttttcgccttccctgctcttgatggggaggwtgctagggctacgtgttcgttacatgcagactccaggtgtacgttgccgagctaaccctgcaggagaggagaactagagagtgtgtcctggaggtatttctgagggattgttcaaaattactcttatttctgctgggttgtgaaactctaggcagtgatgaccttactacctttaaggtcacagaaaccagcacagtgcctggcacatggttggtgatctgagtgccgggttgtttataaaggacagaagattcggcagaactaagcaggcgtcagaggagttggtgggtgtgagtgcccctgtccctgcacttcgggtggctgctggtcctccgggtcctgctgtgtggttagacggcttccgggcagcctggtctggccagcactcaccctgccctctctgccttttctcccccagggtatttggtttcccagtccactatactgacgtctccaacatgagccgcttggcgaggcagagactgctgggccggtcatggagcgtgccagtcatccgccacctcttcgctccgctgaaggagtattttgcgtgtgtgtaagggacatgggggcaaactgaggtagcgacacaaagttaaacaaacaaacaaaaaacacaaaacataataaaacaccaagaacatgaggatggagagaagtatcagcacccagaagagaaaaaggaatttaaaacaaaaaccacagaggcggaaataccggagggctttgccttgcgaaaagggttggacatcatctcctgatttttcaatgttattcttcagtcctatttaaaaacaaaaccaagctcccttcccttcctcccccttcccttttttttcggtcagaccttttattttctactcttttcagaggggttttctgtttgtttgggttttgtttcttgctgtgactgaaacaagaaggttattgcagcaaaaatcagtaacaaaaaatagtaacaataccttgcagaggaaaggtgggagagaggaaaaaaggaaattctatagaaatctatatattgggttgtttttttttttgttttttgttttttttttttgggtttttttttttactatatatcttttttttgttgtctctagcctgatcagataggagcacaagcaggggacggaaagagagagacactcaggcggcagcattccctcccagccactgagctgtcgtgccagcaccattcctggtcacgcaaaacagaacccagttagcagcagggagacgagaacaccacacaagacatttttctacagtatttcaggtgcctaccacacaggaaaccttgaagaaaatcagtttctagaagccgctgttacctcttgtttacagtttatatatatatgatagatatgagatatatatataaaaggtactgttaactactgtacaacccgacttcataatggtgctttcaaacagcgagatgagtaaaaacatcagcttccacgttgccttctgcgcaaagggtttcaccaaggatggagaaagggagacagcttgcagatggcgcgttctcayggtgggctcttccccttggtttgtaacgaagtgaaggaggagaacttgggagccaggttctccctgccaaaaagggggctagatgaggtggtcgggcccgtggacagctgagagtgggattcatccagactcatgcaataaccctttgattgttttctaaaaggagactccctcggcaagatggcagagggtacggagtcttcaggcccagtttctcactttagccaattcgagggctccttgtggtgggatcagaactaatccagagtgtgggaaagtgacagtcaaaaccccacctggagcaaataaaaaaacatacaaaacgtactggtgctttcctgtctaagtcgccttttgtgtgttcttttatgaggcccccaccatccacccctctgtgcacaaggcggctcccggcccctggaatgtgatgtttttggtcatctccaaaggctgcagttttatactgggaggctgatgacaccttttattataattattcttatggttctggttataattatgtttgttttaagattttctttaagaaaacaaaaacccaacacccttccctttaggtttcaaaccaaggtgcgggagcagggtgcttctgagttagcggtggctctggtgccctggctcccacccctcgggccaggtgggccactgggcatggtgacagctgggcggccagggagtccccaaggtctgccttctgggcttgtcactcttctcttctacttcccctcctcttgagtcgggtgtgtcagggctggagggaggacyggccgtctctctccttgtgtgtgtgattggagtggtgtgtatttcttttctagtacttggtctgatgatagctgtgctcttacctcgagtcagcagcacctggagccccaagtgctcaacactttgttctacttcctacaaggcaggcggcctggcgtcagtagtaggaagggatggcattgttggctccagggtgagggcccgacgggcaggtgcttgcctgggtagatggggtgtagatatgtggcatatagagatatatattttataatgggaggggggatggcacctcctgggactggtagagctgggaggtgtgtcggcaagcacatggccccaagtccacgtccctagaaagatggggcctacagtgataggcgctctataaatacatagatagggtcatgtttaagaaatattatggggtggggagtgggggaagcaggcttagtgtgctgagcctcggtccccactgcagacctaaaccccacaccaatcagtcaatctcacacgcatacacaggagcatatttctgtactgatgcataatgaatgcactcacacacacacacacacgccagggggctcccagcactcttctcccagggttcaggactttgtggagtcagcccgtgcagctatttacctctgttgccctgattgcaggtagactgtcaatcccagaagttgctaggtgctgaggcaggaaaaggaggaggtttcttttagcaggtgctctcctctagcaggtagtgttctatctcttttgcccctggtgatgtcaaaagattcttctgttagcaacctgtgatactgacctgcaactctaggcaccagtcaagtcagccctcaactccccctacctattctccccaactgaaatcaaattgacatccaggtctgtcttggccagggggcttccattggggaaaaaaaatgggacagtgaacctcacctattgaataaaccaaattagtaattagtgacaaaaccaaaccaaggctttggaccccctgctcattactcaggagtaaattcacacagctggtggccggtctcacccctttttggggtgcttggtcctggaccccaatctactgtctcctcgacagattggtgtttaagatcatgcccagttgcttcctgtcacctcttgacaggtggtgactgggctgctgtggggctggagcagcgaggaagggagcctctgccccctcagtggagtccctgtgctaactgtggtgctcacccagctcctccttgctcccgcggggctctgtccttcgggcctggagtccaccagcgccactccaggagggctgggggaggaggggctgcctcaggcagtccaaggtgctccctcccccgctggccaatgctaaggtcttcccggctcccagggtcaggacagagtcttctaaggctcaggctctcccaagccactgcttagtgacagttagcctttcccagcggcccaagctccaccggaactgggcctggtgctccaaccaaagggttggtgttgggacttgggaagagacttggtagccaagggcatggcaagcctgggggattcctgtgggccggcttgctcgaggagggagtgctgggcacagaggagcccttatggctgacagcttgagagcacttgttcctccagatctagccacttgaccaggccctagaatggaccagatgccccaggggtcatggccccccccccccccccttgcagggacgagagttaacaatcaccagcttttcttccggcccagcctgtgtgcttggtctcacagtagaatttaggagagtgtggggctttgggattgtgccaacttggccaagctgagatatgcttaatccacctcaacgctggggcctctggggacaggtattgggtcaccttccaaggggtgctgaacttcagcaggctgtagataaggcagaggttagaggcagtggagtgggggaaccaagaaggcctagggaaaattgccaggcatattccctgtggaattttctttccgaagagtaggcccatttcccccttagaaacaagggttctgggggctgatgacagcttcccctgcaggtgccaggtggcgcatgatgccaaagagatccgtggctcttgcctgggggaggtagccaggtgctcgtgctggggacacagtccttggcctcctgcctaagcaggaagctagtttccagcaggcggctggtactaaccccccgccccacgggagcgacaggctggtgcaccggcagactggggggccgcaggcgggcactagcaggggtctgcagtccatagatgatgacatgaatctgttgctgtccttttgtctctaggccccagagacttcttgctattgaacatcctattggaaagcaaactttccaagagagcacccgggacctgttagcttttgaaacaggcctgggtgtgattgactggtagagatgcctgtgtgatttttggygcattgcaggagtgtggattgggacaggcaccccagcaggaaggaaggctgacaccaaaggggtctcacagggcccagctccccttgcttcccgataattggccaccaggccatggcgactctggggaagcctagatgggaacacccaccttctccagcagtagaaggaatatttcagcagagccatctgggagatgttcttataggaaaactgcagtcattcatttcatagttttgcttatataaatagagtacatttgggaggcagttttgaattcctgttgctactctgcttggtgcggagttgcagtggccccaagtgtctttcagagctgttgcttttaggatccccctcaagctgtgggttagggccagggcagggagggggtgctgcctggcactgtgccctgaagagggctgcttgcttcctttggtcgggagcacggcagagccaacattctggtgggaaccgagtttctagccaggcccctgttttggtcccgggaggtgagtaatctgagtttgtcattgcgtattctccacgctgcctgctctcagtgctggagactagagagcgaccctggagttgtcctctgggagtcctgcctgtttgccagggagcagctgaaacctccccgctcccaatcccgggggtggaaaaggtgtagtggaggaatggtctggagctgggatggcccttctggccatgccctgctgagccaggattaaggaaagtgtcagccgcctccttaccaggccctgtgctggggtcaggaggaccgggaggagagggaaggggtgagaggatggactctgctgttgtagtgtgagctctggaatctttacgttttggtaaaggcaggccagggtctttgaggatcgagttggggaaccttgcctctgtgtttccgagacccagctaaggtgggcctttggtgggtgacctgtctctgacccgaggcagcagagttttgggggagggagaaacaagcaaggagcagggaggacaaggacacaagatccctttgctggtggtgacttactcacttcccccaccagagggcctgggactcccgaaactcccgtaactggaaagctccctggctcagctccactggggggtgaggagggcggctccctcagccccagcctagcggcctccaaccctgtgcctgagaacatgagcagcggtctaaagcatcccctagtcccatttcacttcacagaccgatttggttgcacagccctagaattcaacagacaacaaaaatgctgaaattccttagaatacgcagagggaggaggtgactcaccaaggtgctaaaacattttattaaaaatatatattgttaaattaagtctgctgtctggacaatgactgtttgttttgttttcttgtagtggagtttaaaagagactattattttactctgatatattattattaaaaaggcattttaactttgtacttgaaaactaaatgagcgatttcatgtgttttagctgaggcattgaagtagcgggtgcttacttatttgtgggaaatcatgtattcatactgaagaataaactccgtagctgatttggtaataacttttactgttacagacgatttcgctttgaccccggtggcagagcacttttactccacattccacgcagctaaatgcaggacttcccagactcttccctccccagccctctttcctttctcttaagttcctcttttctcctttattattattatttttttttcctggttccagcatcctttcaccactgtattttttttttttttttttttttttttttttttttttttttttttttttttttagggttgcttctctatttattgacaataataatgtacatttcacagtctggttctaggacattcagggaagggcgagtgggggcccgaggggtccctgccccacccgcctggtgtcctgttgtatctctgtgtaagtgatgctcgtgacatagctgtttatgaaataattaaagaggtcaatgcgtacaacagatgtagaaagtctgtcagttccgccttcatcacatttttttttgtgcccagaagaatataataaagctcctttctaatgtacttgtgctggagaacacttgaataaatggactgtttttgtgcaaaaagaaaaatggaaaagcaccgtaataatgtcgttttgtcttgcgtctcctttccctgccatgactgttcacagcctcctccagggggctcaagtacctaagcggggaggtgctagcgtcgggcccagatgatgtagggcctccctaaaaaacgtcacctgtgtgagcatcaaattagtaaatgggagctgtcccctgggtgcaggaaagagtttggttgactggaagctgaaaaataagttatggtgagacagggttgctgggaaagcaaattcagctctgggctgagcaacagaagttttcataccagagcagggagaagagcgcgccttatgccaatgccttggtcagacacggcgcgaggaggatttttgaacctaggtactcaaactctaaacagggttttggcaacaagcgagcatccagagtggtagatggtcgggaatgtcaaggggccccagaacaaatcggggcatttgtcctagaaaaagcaggaattggtaggccaatgtttgtaaacacggacagggcgagcccaaagggccggggtctttccaggtgttccacaggcaggtggaatggtgtgggggaagccagtgtcagctcagcataaggggagggaggtccctttccctgctccagccaacaatgcaagggccaccttgagtgcagtgacagccactcagggatacccccagttttcccttcagaccccaagtctgagttcctctcactgtatggccctccccagagctgtcttgcaagtggacagtgcctcatggtctgcagagcccttcacccagt

SEQ ID NO: 95095 - DNA, 21045 bp, Homo sapiens
cccagaatactttttccagatgctgccattctgcactttgaaactgtgccacactggctagtcctgggttctgctctacttctctttataggcaagctccttaagggaaggtagattatgtcacagactctgcactccacagcctctggtacagacctaggaacctagtaggtgctcaataaacatctttccaccggctggccatctacaggaagtataaatttgcggggggagggggcaagccctgaggacaggggctgtgggacgttctccatcattttcccctcaaggaaaggaaagagaggatggttggggtgccacataattaatcaatgaagcccctagcaaacaagggccccttaaaaaaaaagatacccctcttctccaagggcgtatgagtctaacgagggacagattggtctatccaggaatctatgtgagaatccccacccctggccagggcttccagcaacctttcttcccatgagaaaattaaacctgaggaggtaaacccaacgaaaaaccaaaataactcccccagaggaggctactcgtagagagaagggctacgtaacatctcatctgtgagcctatgtgaagagtgagactcagagatacagtgaatacacattttggctaaatgctaaagggacacatatttaagtcaatatctgactaaacaaaaactattaccaacaaagaatgaacttccaggatacaagaataaatatgaactctcaaataaattattgttcctattacaattcataccttttttaaaagttagcagactgatcatagaagttggatgttatagtgaaggaacaatgatgtcttaatttctcaataatgacagctgctggattgctcttgtgatcactgcagtgcacatttatgatattaaatatacatttactttcaactgaggatgatggacgttcagactatttttcccaagtggcaatccatgtcctagttatgctaattagatatgataataacctagacacatacatgatgctttttcatatgtaaaattttgtgtttagtttttggtagagacagggtctcactatgttgcccaggatggtcttgaattcctggcctctagcaatcctcctgcctcagcctcccaaggtgctgagattacaggcatgagccaccgcacccggccacgtgatccttgatcacacacaagttcaaggaagacagaaataatgctgaaatcaacctttggctatttgaccctctgaagatccaggccaaagccaaatttcagtgcatccacagatacagtaggatgaagatttgctacttcctatctccccaagagcaaaacagaaatatgcgtatttatcagaaggaagaaattagattttataaaaggaaacaagctttgtttcagcaggacaaccaccaaatatcccattacctcctctcaaggagatcagctaatggtgggattcatggaagtgttgacaccaagtctacctttaaggggctttcagtcttgttggaatgacagaatatcagcaggtgaagctactgtgagttacatgagatagtcaagttcatagtcaagtgtccaggtgcataaagcacagatgtaatttaacattagaagagaagcactcctctggaactaatggagcaaagccttatctagaccagtggctttcaacttcagggctggagtcttccacatcttcaactgcgtattccaaggcccgggtcctgtggctcatgtctgtaaccccaatactttgggaggctgaggcgggcagatcacctgagctcaggagttcgaaaccaccctgggcaacatagtgagaccccgtctctacaaaaaataaaattactgggtgtggtggcatgtacccgtagtcccagctacttgggggactgaggtaggaggattgcttgagctcgggagattgaggctgcagtgagccatgttcacgccactgcactccagcctgggtgacagagctcgagagcctgtctcaaacaaacaaaaaacacaactgcatattccagcaatcaacaggctgaaatgtggcacacacactaccactcacctacgccctgtgtaccatatacaagttcaggtacttcacatgtaatatcccattgccagtctcagtggctcacacctgtaatcccagcactttgggagaccaaggaggatcacttgagttcaggagttcaagaccagcctgggcaatacagggcgatcccatctctacaaaaaaaatttttttaagttagccaggcatggtggtctgtgcctgtgtagtcccagctattccagaggctgaggtggaaggatttgcttcagcctgggaggcggagtctgcagtgagctgtgatgcacgactgcattccaacctgggcgacagcgtgtgaccctgtctccaaaaaataaataacccatttaatcttcagagaaaacccctgagagaaaggcattatcatgacagccattttagggacaaggaaaccttcctccaggactcacacggtgagttcaatgatgaagctgagatttgaatccaggtaaagagcttgtgctggaattggaatccaggagaatccaatccagagcccatgagcttaaccttcacgcaggtcttcactatgcacaggcctcacataggggcctactatttttaaattgtatgaaaatgggactaaaatcactaacataaataaatgttttaagaagtatgtagaggccgggcacggtggctcacgcctgtaatcccagcactttgggaggccgaggcaggtggatcacgaggtcaggagatggagaccatcttggctaacacggtgaaaccccgtctctactaaaaatacaaaaatttagccgagcatggtggtgggcaactgtagtcccagttgcttgggaggctgaggcaggagaatggcatgaacccgggaggcggagcttgcagtgagcagagatcacgccactgcagtccggcctgggcaacagagcgagactccgtctcaaaaaaaaaaaaaaaaaaaaagaaagaaagaaatatgtattttttggtcagtagagtttctattttctcaatcaacagacaccaaagttaacaagaaaatatgtaaaggtctttaacggctttttttttttttggcattacatttttgacaaattatactgggaacattctaacttaggctgggtgacagatttccagctttcattgtactggtatactgcataacatgtatgcatacatgaacacacacacctatatgcatttcagtcttttgaacgatccaaatatcatacaattatttggatgttaagtgcattggcagcctaggaaggtcaagatatgaactgtagaaacaaggggtcttcatgtgtaaatgatgggcccagagtttgggatctgagccaggtcagctctaagaggctcagtgtgacgaaaacaaagtttctgatcccagcaggagtcacctacagataaggtggatgagaaaaagtgtgctgacttcctcccgcaaaaaaaggggacattttggaagaatttcgagtggtaccggttacacatctttaatgagaatactaacttaaatggcctggggaaagggtgaggagatagaggaaagagactaaaacacgtgcacactttctacagtatatgtactttttatgatcagaaaaatatcacataaacgaccaggaaatattctaagagaaacagtaagttcctgctccaggattcaagacccctagtttcctcctgtggtttctcctagtttctgcctgtggtcccctagtttcctccttcactgtgtggggacagagcttctcaccgggaaccttgccctcttgcccttccctgtctcacagacctctgttttcttagccctttgtccccatctccactgcagcgcctatcagatcacactaaaacgaccgttatttaccagctgcggagttggaggcgaggactgagctagataccatacacagattcccgcttttttaaccattaaatcaccctcttttacaaatgttactatctctattttacagacaagaaatcgagacatgaagattaactaacctgccccaatttaaacagctaacataacacatgggccgcccaacgtcccttactccaaagcacatgctcattccactagggtattaggctatgtgttaatgtaacggcaggcaatctgaagggctccactatgtacgtgccgaacagaattaaagggggggtcccacactgtccgcttccgatgaagaaaaagacgcagaaaagaaaccgccacacgtggagaatcagtaggtgcaagccaaggacagtttgcggtaaactgccaccccggaagccagcacccaccatcctggtctcccggagtttgggtgacccctggcactgttacttctgcataaaagtagtggatttaacccctacagaggcagcgccccgtatcctctgaagctgtctccagccacctaaagagacgtcttcattatggctcaactcatttgggctgtaaattgctgaagcgaagggctttttcttctgcatccctttcaagttccgtcggcagggactacaataaatcatcacattatgacgctgaaagttcatctctaaaaagctttcaatttagtttgatgagactaatggcgtccaatcgcacagtgccgggcacataacgggaagtccaaaaatacagttattattggaataaaaattcaggctgggcgcagtggctcacgcctgtaatccgagaactttgggaggccgaggcgggcggatcatttgagaccagatgttcgagaccagcctgggcaacatggcgaaaccccgtctctactaaaaatacaaaaattagtcggcgtggtggcggacgcctgtagtcccggctacagagagccaagatcgcaccaccgcactgcagcctgggcgacagagcaagaccctgtctcaaaaaaaaaaaaaaaagaaaaaaaaatcagccaagacttggaaaaagaaatttaaaaaaggaaaattcatgcagccagtaactattgggacatcactcaccaggcactatgctaaactggggttaggtgctgagcaaaaccaggcccctctctagatggctctctaggtcccacgaccatagcttaggtgacaccggcacctgcgcgctccacagcctgtcgaaaaacactcgggaagcaaacattgagaagaaaatactccttctgtgggcctttaggaaaaccgagtgacttttttcgtgaggggaacccatctttgtaagcattcgcggaaacggcagttttattaccgccgggaagggtcccctgagtgtgtgccccatctgagttccgagctgggcgggccatgccttgccaaccccgctgctcgcagcatctgcaggcgctgagcgaggcatcgctgcctggccggggcttctcggatctggggaaatcgaggtcgctttccccggctctctgcagcggggcagcgctgtccactcactccccgctccccgcgcacgcccttgccctctttcccccaagtagggaagggtctacgcgggtcatagcagagaggccacgccgcccgtggtgacggccggtcccggggagggggcgccgccactgccatcccgcagcctgcgctccccacaccccgccgcaggcgcagcggactggtggagtgatgtcgggagatcgatcgagaagaatctggaagaatccggttagacagggaagcgggcggggatgggagggagggaggaagggccaggggaggccgccggggagatcccgagtccgagggtcccaggagaagggggagggggcaggcagccagaaggaggcaagaaccaaaaaaaaaaaaaagaaaaaaaaattccgaagcgcccgcagcactgagcccgaaccggctcagtcccgccgtctctagaaagttctgcaccccgccccctctgtctgcgctcccgctcctcccagcccctccctcgcggcggggcgggaccaatcgctccccgagcygctcctgacccacctaccccagctctcgcgccgcgtgcagaggtgctcaagcctcctcgcggtccgcagtcagtgccgccgcgcccrgcctcccgcacgccccgcaggtagcgcccccgcccgcggcccagagtgcgctcgcgccggcaccagctcccggataaacggcgcgccgcgmggagatgacagccgaggagatgaaggcgaccgagagcggggcgcagtcggcgccgctgcccatggagggagtggacatcagccccaaacaggacgaaggcgtgctgaaggtgaggggcggcggggcctgcggaggcgtcggaacccggggccccgcgggccgcccttccgccgcgcccggagcccgcggccgggcacgggtcgaggcggccgcctttgcagcctcgcggccgtcccgccgggggccggtggcatcgccgtcccggaccgggctgcgtcgtttaaggcaccgaggccggccatgcgctcggcaggggggcggcctaggtgcgcgggccgaggccccaggctccccagccggcagcgcccgggcccgggcagggggtcgggattgcagtgcccaccccggcgcgcgcggggcggcggagaggggcggggcgaggcgaccgccgcgggcacccgagccgcagcccggggccaggccgggcctcccacgccacgccgcccccgaccycgcggccccagcggagctgccagccgcgggccgcctcgttggtggcggtgccagggctcgcccacccgggcggtggaacacgggccaggacggggagcgactccccacagtgctttcctggcccttcggcctttgtgcgacgcaggcgcgacagggttccggcgccctcccggggtcccctgccgacgccgggacccagcgaggtccccactcgccgcgcggcgccccctccctcggccccggggaggccgggcgcggggcatgccgggagctgtagtcccctcccccctccgccgcctcccggagccagggctgcggggtgtggggcggggaggaggcgctctgctgtggagcctgccgccgagtgaccgctcgactacaaatagcctggggagctgcggggagggcatcttgacctgggccaggacaacctgccttgggtcggagcaggttccagggagaatcagagatggtgaattcccagcctgcgtcttatgccttctccccatccgctgctgcgtcctcatcctggcttcccaccgctgagctccgcgtgtgcggcacccacctcagggggcctttacctggtccagaagtgcatctgtctttgcaccagattattggggacctcaagcgtctgctccagcggctctcctgtggcatgtgacttccccttctcgctccagcgtcctgccgttttctacgagattgttattccaggaaagctcatttcccctttgatccatcattccttcccttttacctttctactcctcaaagcccctgtctattcttcgtggaagctttcccttggagggtaaccacacacctaccaggtggcgctaaagaagcctttacgtttctgggaaatactccagccctggactaactaccagaggaatactcagctcccaagtcagagtttaaggtcccatggagagcctccgggttcacctataacctggtttcttccttacctgttttgaactgtttctattctcttcactcatactcctctcgctctcctgtctccaaaccagaccttagtctgacgaccactggcatgaaggaagaaggaggaagtgtggcataaatacttccccctttgccgattataataataatctattattcaaccttttactggtctaatcttccaacaactgtaggagatagggattatcatcactgctttacaaataaagtgtggagaattttaaaaacttaccatacagcggaaacttgaactcagatctctcagccttttgtctcctttttcaaaccaagtcttgctgcacctcaagaaagacaagaaggttagttgactcataagccaagctgctagtaactgaatctggagggacaagtaggcagaggaggatgaacacagagaagtccctttatgttccctctggaggcttgcaggcagtgctggtgcccctttctgccccaaaccctggggtactcactttctcccccttcctcccaggtcatcaagagagagggcacaggtwcagagatgcccatgattggggaccgagtctttgtccactacactggctggytattagatggcacaaagtttgactccagtctggatcgcaaggacaaattctcctttgacctgggaaaaggtaggcgtggtcagtgggctggtaggataggttcgaggtggacacaagctgtcacaagcagaaaccattttctcaggaccaagctcagggaggaatggtttatcacagtctgttaactctttcggtcactcttttttttttttttctaccgttctgtaactatattgatctctgtctccccttctcctcatcacctcccaacaccttactcccccttcaaaggtggactgtcttgcatcttaaactcttttgttcagggtcacgtgatcttttacagttcttagacctggtagcacttaatacaaccaggtacctcaccttctggtcccatttctaaaggatgtccagcttccccatgagtgtggtgcagtaactcttcaggagcactgtttgagcccagaatcagaaccctgctaaggcggtcctgtttgcttctgtacctgcaggggaggtcatcaaggcttgggacattgccatagccaccatgaaggtgggggaggtgtgccacatcacctgcaaaccagaatatgcctacggttcagcaggcagtcctccaaagattccccccaatgccacgcttgtatttgaggtgagtgtttggtcactgagatccaggctaagagccaggccttatctcarcccaatgcctggctgccctccagcccttcctgcttcttggagacaatgtagccaaggctgagggtctggccttatgggaggagaaatgcagagggctctgctgctgctagtaatggaagtaatagaagcttcgggtgggaagaggcaggcacaagcccctctccagactcaaagcatggtcagggttaaggcatctttatctccagagcggtacccagaagaatactgaaaggagtcgggatgtcagaaactatgtcccgttataaatggcagtacagaatattggtgctctagagaccagaagagggagcagtagctcccctgtgggtcaagggctgagaaaaggcttcactgaggagatagaacttgacattgttcaatctgaaaatggttgagccaatccgtgggcccttgaatactgagaaactgctgagagatgttgggtaatcatttctaatacctaccaggttgggcttatcaggtagtgtgaattaggattatctgggacgcgtcctgatatgtccgtgttagtagagcaggtagcaaatagattgctctcctcagcttaactgaaatctatgtagtctgcccacctctaccaaagttgagattagggcagctcccaagaactgaaaaaawgtgccactctacccaactccttgtgactgcccttgtggtcagatccggcctggcagttagtagggactctctcggatgagaaagattgtgtttcactgcccatgagttagcatgggaaggaattgtgtcacatcttgtcccacaggtggagttgtttgagtttaagggagaagatctgacggaagaggaagatggcggaatcattcgcagaatacagactcrcggtgaaggctatgctaagcccaatgagggtgctatcgtggagggtgagacagtacagtctgggctttcaattctcattctgatatttaggccttgtgtggctttgggcaagacacttccgttctccgagcctatcttcttgtccataaaatgaggggttggaccatattctcttcatatcactccagatttgagaacacaggagaatcttgggatgatgggggtgatgcagggaggctgatggcatccttcctcagtcacctgccctcttacaactctggtacactgcctctctttcatgccagttgcactggaagggtactacaaggacaagctctttgaccagcgggagctccgctttgagattggcgagggggagaamctggatctgccttatggtctggagagggccattcagcgcatggagaaaggagaacattccatcgtgtacctcaagcccaggtgaggggtgggcacttcgtagggtaggcaggcaggcaaaccaagatcaaagatataaaatgaattgtagaaccagctgtttgtatcctttttaactctggccacaccaaacatacaccattatgatatcctcagtgtacttagaagtatggcccaattgtctacatctccttggatctaagcccagtcttttcagtcatagttgctacagattctctcctctgccatcaagattttcctctcccattaattcatttcagtcattactgaaacagctactacatgccaggcactgctgaaaattcctatagggcttcagagactaatagaacattgtttctgccttctaattctagctcattgtttagtgaggtgctatttaaattagtaatcacactgctgcctggctgtaagttattagaagggtatgaaggatgctgagggaccatctgacagtgtgaagaggccagggaagatttgccaaacatttgaaccaagtctcaagggatgggaaggtactttccaggaaatggacaggaagccttttcagcctggagcaggttaagtgttgccaagatgatacatagtgtttttyacccctccagctatgcttttggcagtgttgggaaggaaaagttccaaatcccaccaaatgctgagctgaaatatgaattacacctcaagagttttgaaaaggtaagtttgctcagggtcttcccatctaaagtcaagttscaccctgtacgtgactctggggtagctgacaactttgtttctctcctggggtgtgrcaggccaaggagtcttgggagatgaattcagaagagaagctggaacagagcaccatagtgaaagagcggggcactgtgtacttcaaggtgagccaacagtcattgtcctaaggacactcccaggaagagttgctctgagcctccccttcccttggtgactgagatcattttctgccaagaagtggacaggttggcacctgccatcttcacttcatatatgtgagcttgctggccttgccagtgggaagggtgggagcaggaacctcttgtggccatgtgtcactgatgtctgcagggtataagagcytagtaccactgaaactgtgccaggtgcctgagcctctctcccattccaggaaggtaaatacaagcaagctttactacagtataagaagatcgtgtcttggctggaatatgagtctagtttttccaatgaggaagcacagaaagcacaggcccttcgactggcctctcacctcaacctggccatgtgtcatctgaaactacaggccttctctgctgccattgaaagctgtaacaaggtgaggccccctcagaggtcatggaagcagcattcacaggcagagttgggtgagctgccagcatgtctgaaacttccccttggtgactagggcagggatagcagggtggatcagtgggagctctgaggttacagaccaaaggcacggatgcaagtattcatagcaagaaccttagctttggtgggaagcagttggcaagaaggaggaggacacggaatgggaagaatcacataaagagttttcttccaccttggttcttagcctctccgcttacctacttgctttattctaaagtgaatgttaatgtctgaagtctttatttcatccaaagacctgctgtcttccctctctgcctgttggattaaatgaggttccttcctagaccctggattgttccatttaatgcctcaggccttgttcttcctggggtgcagccagccacttgcattcctcctcatcctcctgaggggtacctttggaacccagtctaggccagatgagctasaagccctgagctcccacaatgtggcttcctctctgcattctttaggccctagaactggacagcaacaacgagaagggcctcttccgccggggagaggcccacctggccgtgaatgactttgaactggcacgggctgatttccagaaggtcctgcagctctaccccaacaacaaagccgccaagacccagctggctgtgtgccagcagcggatccgaaggcagcttgccygggagaagaagctctatgccaatatgtttgagaggctggctgaggaggagaacaaggtgaggattggggtggggaacagttggaatagcatccctccacttaacctggctactgtgggctctttgtgcctttggttgtctgtgccaatcccggaaaccagaagttgccttttccctggagcattaaggagcacgtgttcctgctgttggggccagtgttctgtgatcagtgcgggaaacctacccacaagccccagaagttgggttggttgccctgagtgtaattcccgatttatgttttcttgtgggccaggcgccgtggctcacacctgcaatcccagcactttgcagagccaaagtgggaggatcacttgaacccagtaggtagagacctcagtgacttaggatggcaccactgcaccccagcctgagtgacaaaatgaaaccccatctcaaaaaaagaaaagcgagatgctttttgtgtgtgattaaataaataatacacttagttaaattcaaactgtaccaaagtatacagtcaagtctgcctcccccaccagaagcagctgccccttcagggtcttggatggtccagtgtattgcgtcaaggcacaggcagacgttcctgttgcttcctccctttcccctaacacaggcaacgtgctccacctatgatttggcgcatactatgcttttttcacgtaatagtagctggaggcttattttacatccgtatttaaagaacttttacattctttcttaggcttacattgtattccattgtatggatatggcttgtcttagtcaatcagtccctttttagtcttccagtggttttattttttttctttttctgagacagagtttcgttcttgttgcccaggctggagtgcaatggcatgatcttggctcactgcaaactccacctcctgggttcaagcgattctcctgcctcggcctcccgagtagctgggattacaggcgcccgccaccacacccggctaatttttgtatttttagtacagacgaagtttcatcatgttgaccaggctctcgaactcctgactttagtgatctgcccacccctgcctcccaaagtggtgggattacaggtgtgagccaccacacccagccagtcttaaacagtgttctaaaccagcactgtccagtagaaatacagtatcaaccacatgtaattcaaaattttctggtaaccatgttaaaaaggtgaaaaacaaatggaattaaattttagttgcatttgtgtatttttcaaaccatcttcaaaatccaatgtatattttgcactaaaaacacgagtttgaactagccacttacagtagtggctaccatacgggacagtgctgcttagaacagcattgcagtgaataacctcatgagttcataatttgtacatatacaagtgttctgttttgttttgtttgagacagtgtctcttgccctgcygcccaggctggagtgcagtggcacagtctcagttcactgtaacctctgcctccagggctcaagtgatcctcttgtctcagcctcccgagtagctgggactacaggtgcatgccaccacgcccaggtaatttttgtaatttttgttgagatgaggtttcaccatgttgcccaggctgatctcaaacttctgggctcaagcaatctgaccacctcagcctcccaaagtgctgggattacaggcataagccaccaggcttggcctatacaggtatagctttaggacagatgtaggagaatgggtgtatctgtgtaattctgctggaaattaagtgtgtgttttttcacttgggaagtcagcccgtttgctgttcatcttccttgcaggccaaggcagaggcttcctcaggagaccatcccmctgacacagagatgaaggaggagcagaagagcaacmcggcagggagccagtctcasgtggagacagaagcatagcccctctccaccagccctactcctgcggctgcctgccccccagtytccccactccmccctgttagttttgtaaaaactgaagaattttgagtgaattagacctttatttttctatctggttggatggtggctttaggggaagggggaaaggtgtaggctgggggattgaggtggggaatcattttagctggtgtcagcccctcttcccttcctccattgcacatgaacatatgtccatccatatatattcatcagaatgttaatttattttgctccctctgttaggtccattttctaagggtagaagaggcaagtggtagggatgaggtctgataagaacccagggtggagagggagactcctgggcagccgttttcctcatcctttccctctcccagtccatttccaaatgtggcckccatgtgggtgctagggacatgggaaaaaccactgctatgccatttcttctctctgttcccttcctcacccccgacggtgtggctgatgatgtcttctggtgtcatggtgaccaccccmtgttccctgtyctggtatttcccctgtcagtttcccctctcggccaggttgtgtcccaaaatcccctcagcctyttctctgcacgttgctgaargtccaggcttgcctcaagttccatgcttgagcaataaagtggaaacaataaaacctgggtgtcagacaaccctttctgttcagccttggagtggtgggtatgggtgggtacataatgggtagtagcacaatcaaggggtcacccacttagttccagttgagcttaaataagtgcagcatctcatgtagatgccatagttgggcaggaagcagccccaccatgcatggcttcctgagcactgcacaggctgccgctgggatttgtgtctatggcttcgcccaaggttcccagcactccctccctccagcaacctggcagttttagtgcctctggttttcttccctgacacttaggaagacgaaagtataaagatctagaagactgggacaccatgcatgttcattttgaagttggaattggtcttctgcctacctctgatctggcagaggtatctgcattttggtttgttaacaaggtaaaactcctggtgtcactgacctcctcctgtcagataacttacatgattaaggttaagagtaaagcagagtgttcacgtccagcttccttctcagccttaacaggaaaaggcttgtgctttttttctaactatgctttgacccttaactcctatggcatgatggggccctgggagaagccaggcagcacaagccagtcatgctgagctgcctccagataatcctggctccaggccagagcccgtgtctgccctcatccctctctcctactgtgagctctccagtcctttcccaacagcgatgtggttgtctgcttagccacatgcctgtatagttccttccagaagaaatgtataatggtggaagatgtatttctgtgtgaaaattttcaccaagtcatacaacacagctgatgctggagccaggattaaaattggggtgtacaagtctcccagtgtgagtatcccttgagcccaagacaccaaggatgcagagaactgtgactgtgccactgcacgccagcctgggcaagagagtgagaccatctcttttttaaaaaagtccctgtgtaactgctttcttactgggcttacctcacatcacagccctgtgtttgtggtttgtgtctgggtcctcttggtatttcaaaagtagtagattcttacgcctgcagccaacaataatcactaactcaagcatttatggagtaagcctagcactgtactgacagcatcacatgagtgaaactgaatccttgcaaccatcctacaaagaaggtataactttaataaccctatttacagataagaaaaccaagactcagaagttaaatggaaaggtgaggtctctgaactaatccagactctcccatgaggttcctttggcaagtcctgggcttctgtcctcatctgcaaaatcgaaagcattcctgaggtttcttccagctctgcatcctgtaggattccaagaatgtaaaactgcatgtaaccgtggaacatctagagataagtcttagtttatgtaacattaaaactgtctagtgaggatgttttgttaaaatgcctacaagtctttcagcctaaaaataatcctgccacatactcaagtctgccctgggtcagtgctacaagttcatttcccagtcagttgtccctgcctaccgacacttaaatctttctatatgcagagaaatgtgcctgaagaaagaaaagttagtagcaagcagtactgtgagcttttaacaagctttgcaagtggtctctagaaaaatttaaaatagggtttatcttgccctagtgctggttctaacatcgagttccatgaattttatctcccaagtatttctactccctccatactagtaccgctccctcccatcaccatgcactccagcctgctctcctgcaaatcccaggctcctatctgggattccctcctgcccctcctgcagttcactctgtactgcatcccaatcgtgtccctccgagtacttaaatcactttcaatgattacccatcccatttaggctaaagaatccttatcatggcccacaaaaccctgcaaggcttggcaaagtgcacttaacacttgccctcactctatgccagcttcgccaccctgagggtgaatggaggactgtattccatttccattggagaaaaaatatgtgaaaggcactttatgcaggactagtaaagtgtagtatctttttagaaaatgtcattactggaaaaagttagaaagcagaacttctcaaaccttattcctgttacgtctcagtgactaattttccctttccaaatgcaaaacacctcagaaccttaaaacaagttgaaacgacaatgcattaagggcagtgctgaatacaaccaatgtaagagtctggacattgtaagtaaggaaaatttgttctctttctggaattcattattgctgccttatggctacagttccccagctgtttgccaacctcagatgatgtggatgcattaactatccccagttagaaaacctagaaataataaaaacattaatttatcctgtgctaaataacactaccaatttttttaatttaatttattttctttttttttttttggagatggagtcttgctgtgttccccaggctggagtgcagtggcgcaatcttggctcactggaacctccacgtcctaggttcaagcaattctctctcagccttccaagtggctgggaccacaggcgcacgccaccacgcctggctaatttttgtatttttagtagagacagggttttgccatattgatcaggctggtcttgaactcctgacctcaggtgatccacccgccttggcctcctaaagtgctggaattacaggcgtgagccactgcgcccagcctattttttttttcttttttttgtttttttgtttgtttgtttgtttaagacagggtctcactattttgcccaggctcagtgcagtgatgcagttacagctcactgcagcctcgacctcctgggctcaagagatcctcccaactcagcctccggagtagctgggagggactacaggcacatggcaccatgcccagctttttttttttttttccggacagagtgtagctcttgttgcccaggctggagtgcaatggcrcaatctcagctcaccgcaacatgtgcctcccaggttcaagcaataatcctgcctcagcctcctgagtagctgggattacaagtgcctactaccatgcccagctaatttttgtacttttaatagagatggggtttcaccatgttggccaggctggtctcgaactcctgacctcaggagatctgcctgcctaagcctcctaaagtgctgggattacaggcgtgagccattgtgccctgccatgctataccaatttgagaggcaaagtaagagtgaatggtctcagggatgatcaagaaaaagcaatgcctttgtgaatgtcaagggtcctgtggctagaagagaggatcagcatgtatattctatattccattggatcttcagtctcctgttttagaagtgcatcagacataaactgatttgtatttttttaggtgaaattcacatttttaggtgaaacaaagttaaccattttaaattcaacagtttggtggccatttagtctttacagtgttaatctagttccaaaacgtcttcctcattctttgtgttttaaccctgtctcctaatgtttaagtgacacagtgacagtgaacttctcatccatcagtagtcttgagcagacaatcctgatgagttagttctaggattaaagcgtcccagagttggtggtgcattttaacaggggcaaacttgaggaaggcagtgagacttagtagagctctgaataacagcatttcacccggtgcagagctgccccacactactctgccagtttctaggacaaaaaacctaacttttccaacagtttaatatgctaaggtgtaccatgaatgagagaggggagggggaaatggtgatataagccaaaccaagcccattgagaagccatggaccctgcccccaaggtggtgaggctctgggcctcatgttttgaaagatacttggagaccctgtttcttacctgggcaccctgggcaaacacaaaccattctgtctactgttggaggatgaagtacacaaagaatcttcctagaaatgcttcccactggctgggcgcagtggctcacgcctgtaatcccatcactttgggaagccaaggcaggcggatcacgaggtcaggagatcaagaccatcctggctaacacggtgaaaccccgtctctactaaaaatacacacacaaaaaaaaaattagctgggtgtggtggcgggagcctgtagtcccagttactggggaggctgaggcaggagaatggtgtgaacctgggaggtggagcttgcagtgagtcaagagcgcgccactgcacttcagcctgagcgacagagtaagactccatcttaaaaaaaaaaaaaaagaaagaaacgctccccacttaatccccccatcccctcctatggagatttctattgtttgtaaagaatatgccactcatataactgtatccatgtcacctaaccaggaagataccctaattagacagttttggggagcaagacaaaaaccagcagaaagagtgcttggcttagacaagatggagtttagatggtgcccaaagagacctagcaaccttccaactagaaaggggccaagaccaggagtgctctttgtggagccagggatctgtccatatggcttgacaatgcctagtcatacaaaacactcactggacttaaagtaactgatgcaaggtggggagaggcacaggcatggaaggacttcacttgtgccctatttcttggagacctatctttcctgcctaactttatttggctctcttgacaaaagccaaaaagtgtggtatagaagttgtgatcatacgtctaggcatggtggcctgtaatcccagcactttgggaggccgagcactttgatcacctgaggtcaagagttcaagaccagcctggccaacatggtgaaaccctgtctctactacaaaaaaaattatctgggcatggtcgtggacacctgtaatcccagctactcgggaggctgaggcaggagaatcgcttgaacccgggaggcggaggttgcggtgagccaagatcgcaccattgcactccagcctgggcaagaagagtgaaactcaaaaaagtgaaaaagaaggccagacacagtggctcacgcctgtaatcccagcactttgggaggctgaggtgggtggatcatgaggtcaggagattgagaccatcctggctaacacagtgaaacccattctctactaaaaatacaaaaaattagccgggtgtggtggcgggtgcctgtagtctcagcttctcgggaggctgaggcaggacaatggcgtgaacccggagggcagagcttgcagtgagctgagatcgtgccactgcactcagcctaggcgacagagcgagactccatctcaaaaaaaaaaaaaagtaaaaaagaagttgtgatcataattacatgaccttcatggcaaacatattctacaattaaaaacagacaccccgtgtcacagaaagatccagaccaagaaacccaaatgatgaggaagataaaactaaggcactggggaatcctgggttggggtctgatcttagataactgggtcaggccaaggcacctgatgaaagaagctgggtgatctcatctcttgttctgagttatttagtaatatatttttttaaaaccacttcagaggccgggcgtggtggctcatgcctataatctcagcactttgggaggccgaggcaggcagatcacaaggtcaggagttcaagaccagcctggccaatatggtgaaaccccgtctctactaaaaatacaaaaacaattggctgggcgtggtggcagtctcctgtagtcccagctactcaggaggctaaggcaggagaatcgcttgaacccgggaggcggaggttgcagtgagccgagatcgtgtcattgcactccagcctgggtgacagagggagactgcctcagaaaaaaagaaagaaagaa

SEQ ID NO: 95096 - DNA, 18316 bp, Homo sapiens
gacatgatgggcagctgtaggctccagtggcctttggtgttttcaagagtgaccggattccaaaagctgcagcagagaatgatttcagtgaagaatgtgctcctgggttctggacatggaagaaaaagatgtagagacacagagaaggaggccatgtgaagacagaggcagagataggagtgatgctgccacaagccaaggaactccaggagctaccggcagctggaagaggtgaggaaggacttttccctagagcccttgggagaagcatggccctgctgacgcctccattcagacttctggcctccaggatggtgagagaataagccaccaagtttgtgataatttgttgtggcagccctaagaagctaacacagcagacactagtcaaataaccacaaaatatatgtaaaatttaactgcactaaaaaaaaaaaaaaaagtggctgaagcatttttcatgtccaccaacaaagcatgagagttccagcgatgccacctcctcatcagcacatggtagggtcaggtggccttttatccagtcattctggaggtgtacagcggtctctcgttgtgatagtaattgccatatccccagtggccccacaggaaggaggtgtctttcttcatattttccatactcttgcccttctcccggtggtgactaccaggctggctgcccactaccaggtttgtggtgaggaggtaagtgtaggctctctgctkcccggggctgtggagctttctcagccttcccacccatccgcttcagtgcagtggaccctgccttatatccggggcaggtccttcatgggagagcttcccactctgccccagaggcagctgacctggaatgatattaacataggatcttggtcccagtacggtttcctggacctcccccaagggtaggggggttctcctaccagaaatgagccaccatggggctgtgcgtgccctgggagtgacagggtttgttggccctcagcctgtggcttaaggcttttgctccactgaacagggggcttaggacagggggttgggcgcttttcccacagcaaaaacagccccttcagcccccacactactgagtgggtccctctccttccctcatccttccccactccctcaccggatgagcactctgagagcatgcacagagaggaagcagttagtgtgtgcaaactctcaccttgtctgggccccctgctgtctcagaccgacacgccagcccacacctggcttccaacaatttgttaaaactgaactgatttctttcttcttacccactttaatggaggctgccccttcctccaagcactgcccaagtgagccagactgcacatcctgcctctccttggagggacctgcccccttggaattcaggatacttggttgccctgtgagctcacctccctggtgagctcaagaaaagtgatgactttgtagtgcatgcagtcttttctcattgttaagtatgatagcaaggctttctgcctcctggatggaaggtgaatacttcttgctgtccttaagtctttccttccaccgtctctcaccacccattctcaacctaacgctacacattttaggttgcttttatagcaacattccactttcaggcaccaaattttgttcctgccatttgttcctattgctgcagaacaaatcatcacgctgagtggcttaaaacaaaaattatgatttctcatgcttccacgggttractggtctcacttggggcctcacgtgggattgaagtcagatgtctcctggggctgaagtcatctgaaggtttggcaggtctgagcatccaagagtctcactcacgtggctggagaatgatgaacagttcccagagtttctttggcttagtcttagaagttatagctggatgtggtggctcacacctggaatcccacacttgggaggccaaggcccaacatttgagcccaagaatttgagaccagcctggcaacatagaaatgtcctgtctctgtaaaaaatttaaaacattatccaggcatggtgactacctgggggagctgaggcaggaggatcacttgagcccaggaggtcaaggctgcaatgagctatgattgcaccactgcactccagcctgggcgacagagcaagacactgtatcaaaacaaagtcacatggtgacatttctgccatatttgactggtcatactgggccatcccagattcaacatgggtgagaactatgcagggtgtgaatattgggagtcatggttcattgggggctatctttggagactaacatcctgcctaacactacataccaaaagggacctttcacatttaggtcttaaatctatctaactataaagttaacaaaagaaaagggagtatatttttgtagcagggtggggagaggacttatcaaataaattttcaaatgcacaaaattataaggcagagggaaaaaagataaatcttattacaccaaaatataagatttctgcccacagacatcatggatctcatgcaagaagtcagtatacagatggcagaatgggaggagatatttgcaatatcaaaactgacaagcaattaatgtctagattttatataaacacccacaaaccaactaaaaaaaagagagcactaaaaattctcaaaaattggcaaaggatattaaaaagcagttcacaaatagtaacccccaaatggtaacaagcatatgaagaggttctcaaaatcattagtcatcagaaaacaatgtagagtaaaacaattgaaagcggcaggaggcagacaatttcctaggcagatgggggtgggtccccagtgaaaccccaccttcaagccaaaaacagcctggactgctggtttgggatgaaacccctcaacccagggtgagaacttctgttcctgtttgcccaccctttcctgattggttctttctgaataatgctttttaaccaatcaaatgttgccttttctaatactacctacagcccgcccctccccaatcctgtgcctataaaaccccctagactcagccacactgagatagacaaccccaccttctcaatccctctccactgagagctgtttcatcgtcaataaaattctccatcctcatcacccttcaactgtcagcatgacctcattcttcttggatgcagaacaagagctcaggacccaccaaatgtgggcacccacaaaggctgtaacgctggccctctaccctcactggtggagggcagctgccccacagaacagaagccgcagcagggccaagctggtccaggagccacgggccagagtggagaaaggggccgcctgagctgccaacatgccgctgtccatcaggctgcagatggtggagataaaagagctatttagcacactgtaacacccctctctggggcttcaggcacccctgcctgggtgctgccacagtctccttggggtgacacacctgatctggctgtgggccccacacagagcctgttcctgtgtcatggctcagtgcagctggctggaccctgcattcactcggtcacatgctccctcccgccaggggctgagcatacagtcgcagtggccttgtgagccatgggctgtaacacaagccagatggggcctggcaagctgagtagataaggcactccctgctgcaacctcagcaaaggggtcaagaaaaatcctgcatcacaacaagctctcattttatagctattagcctgacaaaaaaataaaaagctggctaatgggaagtgtgagtatgtatgtgtaagatgcatatggaaatagtaccccctcacaccatgcaggagagaatgaggactggtgtccccatcctggacatcatctagaactattttgagatacacacccatggggggaattgctggatttatagggtatggatatacttaagttgcctaagaaactgcccacagcccagggagcaattagagatgttcactgcagcagcattgttgtttaactctgtgtacgtatgtgtttgtgtgcccacatgctcacgggcttgggaggtggtggtagcagcagaaagttgaagggaacctgagtgtccatcactgatagaacaagaaacccatggcagattctcattacaaaatactaggctgcagttaaaagctacagattgaatatacatatagcaacatgggtagatcttaattttccactaaatactctgttttgtaagaaacagactgagaaatgtaatatatttacataataccatttacataaatttaaaaatacacatagacgaaacaacaccacacattttgcaagaacctgtgcaaacaaaaatacacattaacacattagagaggctgctatgggcggtggtggggggcggggaataaaagtggagcacaagaataaaagttaatagaaaaatgtgaaatgtgagaggacttttctaatctgactctaagacttattataaagctataataatcaagacaaggtagtgttctgtcatgacagacaaacagatcaatggaacagaagaaagggctcagaaataaacccacatgtatacagtcaattgatattttacaaaggtgcaaagacaactcagtggagaaaggaataactgagtcgccatgtgcaaaagtgcatctggatctataacttgaagcatataaaaatatttactcaaagtggatcacagactaaatgtaaaaccaaaagctataaaacataggagaaaacttttgatcttgggttaggccaagatttctatgtgtacaacatcaaaatagaaatccataaaagaaacatttgatatattggatttcatcaaaattaagaacgtttgctctttgaaaggcaccataagataatgcaaagaaaatatttgcaaatcactgcctgatcatgtccttatatccagaataaaacaccctcaaaactcgataagaagacaacccaatttcttttttaatgggcaggaaattcaaacatgctattcaataaaaaaaacttatccttagcaaataagtacatgaaaagacattcaatacaattactaatcaaggaaactcaaaaccacaatgagatactgctacacaccaattaaaatttaaaaggctgactatatcaagtgttggtgaggacagagaactgcaaccttcatacactgctgctaggaatataaaatgatacaaccattttgcaaaacagtatggcagtttcctaataagttataaaagtccacctaccacatgacccaggcattccattcctaagtgtttactcaaggaaaattaaaacatacgtactttcgaagatttgtgcaccatattcgcagcagctttatttgtaatagccaaaaggtaaacaacgcaaatgtccaatagtgaatcgctaaacaaattgtagtctatctgtacaatgcaatactataaaataaattttacttagccataaaaggaagaaaccattgatataggcaacaacatggctgaaccccaaaacagttatcctgcctagtatatactctatggtccatttacataaaattctagaaaatgcaaactaatttatagtgacctaaagtacatcagtgcttgcctggccaggtggtttcgggaggaaggggttaccaaagggcaagggaaaacttgcagggatgatgatatgttcataatgttgatctcggtgatggtctcacgagggaaacattaaaatttatcaaattgtacacgttgaatatgtgcaatttattgcatgtcaattatatccaaataagagatttttataaagaaaaaaataggtattctggcgcccagggccacccagctgtaagcggcggggtgggattccaacccagaagcgggcatttggagccctcatgcttcaccctagctccctgaaacaagcacggaggatggctctgagcagcgaggaaagtgctggaagcaagcaggccgagcgcgtccctggctggggacgttaatcattaccggagggcggcccgagcgcggccccgccccgggacggcagcctgcgcgcccrgccgccgcctgccctctccgctggccacctgctgccgcccgcgccatggtgagtccaggggtgcgcggccgcgatcggggcagcggggccggggcagccgcgggcgaggtgggagcgggaaggggcgggggaaagtcttttcgagtcccctgcggagccgccggggtccgaaagtggggtctctgcccggctctctgtcgcyggcggcggggaggggaagctgaagccctgagaggggcggtggcgggtycrmatcccacccagttgggaggccaggcctgccctgaccccggccagtgcttgttccgggacccttccgggggcggggcctacgaccttcctgggccggggaagacagtcgtggaggagtccacggatctcgtccccttggtggcccgattctgctttatactggggtgggagcgagagggaggctgagtttgcgcgctcgtgtgcgtgcctgtccgctgccccttcccgctggcactctgggtacggggtctgcctgggactcacgctctgcgccggtatgctggccccagagccastccccgcgccggcttgaggcccgtgccaggccacgggggcttggtggcgctggagcagccctcctcccgtgagcttcccccacccacccccggggcgggggcgggggcggggcccttgctctgctgtaagctcgsgagcttcatcagaccatttctggtccacaggccttcggagcaggcaagactgggagggccttttgataggagagggacttgggggagggaggatgagtggggctgtttgtgaggggcgctgaggtcccagagatgcaggcttgggaaatcggtaaccactccccacacctcgccagaggaggcaaacggggcagcgtccccctctctgtctccagagccrgcacctggaaggtttgtcagttcagccgcaggctgtgcgacctggggggttccagaaggctctaccgagaaagggaagcctyctaagagctcacctggactcacccacccctttaagagccaaggaagtaaacagtgggctctgatgctttggctgacttctggttgtctagatacacggaccaggcggtcagccacggggagaaggccagctctggagtagagacctacctactgggcagatgatgcaaatcgctgctgccattcaatccctatagtcatccagagccgaggggaagagaggggccaagctacatcagtccagagagagctcacgttttcaggagggaaaacagcagggaaaaaagacggacttaggaaagcactgcgatgcttcagctaccccaaatgctaccaggcccatcacaagcctgcttgccttaggaagttttttttttgtaatgcagatgacatttgctttatagcagtggagtttcctaaagtgtcccattggcacctcatgatgatctgtggaggtggaggttctgccaagagaggtacagccacctggctggtaaatggtgaaagcgggtctcaaaactcctgccaatcaacacatggtgtccagtctgcaggctgcctcataaawgctaaatcaacctccctcacattccctccccacccctaagggtatcttttcaattcagcactctatttctgccctggggtggtgctactctagaagcctaggttctgggatctgttaagctcctagacctggatcctcctaggatgaaactgacccttgcttccttgctttctctgaggttccactcatggcctgaattgtgccaatttgggctgccttgagggcacttcgcacattaggtaaataggatggggcactaggtttgccagctgcctttggccaagttccttccactttggcctgagcttcccaaccagccagaaaagcagacggaaaaccagagaaacctagccctggcggctcaggaccagaggctgcctgggagcatgactgaggacctactagaggtagtgccaacggcggtcagctgcagtgtggctaagaatgggatggacacttattttaaatgtagctccttcgtccagccccagcaatgctgacacacagacaacactgcgccatcactggctaggggtgggcgggaaagaacagcagacaagtcgtttcccctctctaggcctgtttcctcttcaatacacgtgaaagttacggtagggacgtggggtgcatatgatgaagtacataataggaaaaggaaggggggagagtcatgggtactcttcctgagaggttgtggagtaacatatttgcatctgggatttattttgcttttacgccctcactgatgtaataatctcatggagggaaggtccgtaaggctttgagggcagggtgggggaagagtgcttctctgtccccgtcatatgaattacattgcttttgtgatttcccttgtgtgtgtgtggagtgttaaaacccaagacctgagggcctatcggcagacgagcctggaccccacctcctgggcagggtgccacccttgaggcctcccagcctattgctcaaagacctgctgccctttggtcacccacgtccaaagcagccagtggaagctaagttcccctaaaggttggagcccctctgttttgacctataaagagaaatgcccttgggcctctgtttttttccctcttctaggctggcaaagcacacaggctgagcgctgaggagagggaccagctgctgccaaacctgagggctgtggggtggaatkagctggaaggccgtgatgccatcttcaagcagtttcatttcaaagacttcaacagggtatggcaccagggtgggacagagttttctgagacgggctgatggggtcaccttacaaagcatgttctctcccttcacgtcttgttagccaagactctcagacaccacactcatccagttatttgggcactgtgccagtggggaaattaattttcctgtctaactcagaaagtatcatctttggggattggagagccataggaggatgtgtcttgggctctcccttcctggaacttttagcagcagtcttctgaggagatagttcaagtggaaaccatgcacatctgaagacatttgaacagacggccaagactggccaggccaaaagcctgttgtggtgtttccaccttgttgrcatcctaaatagcaagactttcttcctactgcaaggacaatctctaactcaagcctgagaaccagtgacaggatgtcaagggggaaatgattatagaggagtctcctggggggaagctaattcatcctcctgcgtctaggccttgaattggtgatgtccagaagtcctttctcttagaacactaacctggctctcactccacttaaataggcctttgggttcatgacaagagtggccctgcaggctgagaaactggaccaccatcctgaatggtttaacgtgtacaacaaggtgagtgatgctgtgtgcctctgttgtgctctgcccccatccaaatactgcgaactctgacacattctgaaggcttttggacttaacaatgagccttcctgacccataggtcatccactcatctcatttccaatctcactgagattgcacatgcctagaatcaacataaatacccctgggaaaaaaaaatcagtcttactataaagaaatgcaaattaaaagatgcatgagatagttgtggttaaagtagacatttaagtagacattaagaaggcaaaacccaagaaaggaaaggctgtgggaatcaggcatacttattcagtgttcatagctctaaatggctttaatcttgctggaggtatggaagaatgaaaaagtaataaacttgaactaagaatacacacatatttgggaggccgaggtgggcagatcacgaggtcaggagatcaagaccctcctggctaacatggtgaaaccctgtctctactaaaaacacaaaaaaattaggcgggcgcggtggtggacgcctgtagtcccagctactggggaggctgaggcaggagaatggtgggaacccgggaggcggassttgcagtgagcagagattgagccactgcactccagcctgggagacagagcaagactccgtctcaaaaaaaaaaaaaaaaaaaaatacagacacatagccaacctatcaaattatttgcttaatgaatagaaacagtcattaaatgtctaccatgtgccaaaagctctgctggtctctgtttataaaaacagtaagggtggaagaggtcgtctatgaatggatagtgtttaggagttggcattggtttttggttttgtctttagcttttaggttgctcttgacattcagatattaagcttttattctatagctgaagtcatgattatttttgagagacagcaaaggggagatgtagaagatgttgttacagacatgtcaggaaggagtccccaggagagatcgtactggccagctgctattctggagctcctagcagggctgagcccagcagctagtgactccctcctgttcttaagtgaagtcagtggaagcagaatttctggtttcatttcaggtccacatcacgctgagcayccatgagtgtgccggcctttcakaacrggacataaacctggccagcttcatcraayaagtagcagtgtccatgacatagaccctgcccttcctctttgaattcttccgggggaargggtgactgaactgggagtccagggagggagctgaggagcccttaccctcccaccactcccctcccaagacccagccgccgccgttgagggctgagtccttgctgtgggatgtgccagtgtccccaccaacaccaggaatttagaccttttccctgcaccactctcttcatcctgggggctctgttacactaatttgaataaactctcccctttctttgcaacttcccagcaacaataatgattttcttgccaggccgtctcttgctccctaattcatttcccaggaagctgtgatacrgggtgaaataaagtcttgtcttagaaaccaggaccctaaaccccacactatgtaatagaaacacatgtgtttttatgtctcaaataaaactattatatcacttggtctcaggctctagaaacttcttttccacaggtcaatccaaattggagtcaataggcatttaaatgaaagcacttcctctgtgctaggcacttcctctgttcaaggtactggaaaatgacagggaccagaccaccttgccttcagattcattatcatctaggggataccatttgattatcatcaaacaggaacacaattaactattaccaattaccaattaactagtactaattaactattactagagtgaattaatgctaggtggcaggataagaaatgagctaaagggaacgcaagtgattaatggtgaaaagggcaaatctggaggctttgagttatgccttgaagacctgggtaggattcttgggaggcagagatggctgagagaacaccatgaacacagataagggtgtgaagggcacaggtattatatgcattgtggaacctatgtctagaaaggcagtctggggccatattacaggttgaacatccctaatttgaaaattggaaatccaaaatctgaaactttttgaatgccaacatgatgcccaaaggaaatactcaytggatcattttagatttctgattttcagattagagatgctcaacttgtcagtataatgcaaatattccaaaatccaaaatctgaaacacttctggtctcacacctttcagataasggatactcaacctatattttcttcctggctgtgatggctaatgttaggtgtcaacttgattgggccatggggtgcccaggcatttggtcaaacattccgggtgtgtctgtgagggtgtttctgaatgaggataacatttgaatcagtagactgagtaaagccgactgtcttccctaacatgggtggcctcattcaaccaggtgaaggcctgtacagaaaaaaagggctaaaaagggctgaccctcttccaaataaaagggaagtcctcctgcctgactgccttgaggtgggacattggtcttttcctgctttcggacttaaactgaaacatccactctccttaggtctcaaggctacaagcctccggtgtgcaacaataccatctgctttsctggttctccagcttgccaactacagatcttgggacttgtcagcctccataatcacatgagccaattccttataagaaatctctttgtgtgtattggttctgtttctctggagaatcataatacacaggcctatcatatcagatatggcagatcccaaatcctgatggtctcttcagtttcttaaaatcttagcaaagttcttagggcttgcctggtttactccacaagagagaagacacaggcagcttaggacctggcaggctatttattactggagcagttaagagatggtttgcacagtcagttccccagccaggaactctctaggacagaatattcccacgctgtcatgaagaagggggcactaagagcagcctcatctctacccccacgagaatgccacacaaattttacctcacatatgtcactatgcagagactgggaagccttcttcctaatagttctcacctgtgtctcctaactcaagtactaagctgacttgtaaatgccggggtcacttggaacaggaatctagccatgtcacaactcagtctgaatgagttggtcccccagcaaaggccaggaaaggggcagaggctggaggttgagaaataagcgtattgttcacaagagggattagcaggaccccgttcctagcatatatgctagtaaaggattatcaatacctatattgatggcaaacgagattcagacagtggtctcccatctgctccacttctgacttaaaattttccaagtgtgctttgatctgatgactggaggactgaaggacagaagacgccagatgcggaggtatggactatgctgttatgttacattcctgcctctgcttattttcatgggtcaagggttgaaaaatgttcacccgatgcagggacagctcatgcctgtatttccaacactttgggaggccaaggcgggaggatcatttgagctcaggagttagagactaggctgggcaatgtagagaaactctgtctctacagaatatacagaaaaattagccaggcatggtggcacacacctgtggtcccagctactcgggaggctgaggtgggaggatcacttgagcccaggaagtcaaggctacagtgagtgatgatcatgccattgccctctagcctgggtgacagtgaaaccttgtctccaaaaaataaagccaaccttggcagcactacagttgtatgaagcacattcatgtgagacaaagacacaggtaacactttcttttctttttttttttagaaataaataggtttattctaaaattaatccaaataattgaaattatagggaaggatattaagaagagaaaagattacaagacagaggaaagcataaaagaaaataaggtaattaaaacttcaaatcaggaaaaaggttctcaaaaatctgactttgcctacccaggtacagttggtggctatcaaattaggactcagtaattacttgtgtcactgagtgaaagctgctcattgctgccaagaacctacagagaaggccaaggggctgacgtacagctgtatggagcagcaataagcaccccagacacgacttcctagataagccaggcctcctcatccaagtacatcctggatcctctttctctctggtttccaggtactcaggaactaggccatttggcagaaaactgtagcaaaaaagcaatccttggcttgactctggcaaagtctgaatgggctaaaagccaaaaggaaaagctgggttatctgaatgacagccttcagatcctgactaacactttggaaaaacttctcgtttcttattcataatagaataagatctccagcagttacatgtgtgtgaagattatctgaggagctctgttagcccctaaaccaaatgcagggtttgaggccaatgccctttggttagacagaaccacactgcccagatggctagagaccacccagataactcaatccatcattaagttattgtaagcagcaaactgtaagcagaagtggatgatgaagatggaaaaaaatataagatagggcctgtccctggcaaactaagaacctgaatttcagacctctctgaaataggtacgactaccactgctggtgcaaggaccaatcagcgacctattgaagtgcctggaaatgagatggattgctgcttaactgtgtctctttcattggtcttggtatcagtgggcacacacgattgtttcaccaccagggggcaatctctcaccaggagcccattcaagcatggccactgccccatttgtcatctcgtgtgtgcccaagtaatcaaatgaatgcaaccatccacagtaattacaattagggtcatttaactatttaattgctttttgagattattgctgaaattaggaagggagcattgaaatgggaagggggaggttagagaagacagagatttaaaagaagcaagtaccattttccaagtataaaactcgtaatattaaaagtgacatagcagtatattcacatgactacttaagtctaatgcagaaacaagacagtacagtttttgcagaggccgatgtgacatctgcatgcracatgatactattaagtgtctctacccacctctgctacagagtagctgctatatgcacacatacacaaaaatacacaatgaaaagcctacaaaagtgttaagtcaaactaaggctcttaattgtaaattaaagtggctacagtaggtccctttgaaaaacaccatctcccctggcaccaatgttgtcacagcacagaggaagcgagtggctcggggtctggttctggggagacgctctacaggggcacatgcttctccatcttggcagctggcaagccacagtggtgtctgctgggtggctctgggttcctggacctcattcaacataatgcactgaccaaacagctctgaccacagctactctcaaagaggtgcctgccaggtctccctctgacacacacacatacacacactacccactcttggaacccacaatgcactgctgggcaaacaggaaaaacacacacacacacacacacacataaatgccacaccagccctgaatggcgtggccagctagtcacagttgttgggtcagtagtacagtgctcaagaacaattcagactaacatgccaaggagcctgaggaaaagtctggtagtcatggctctcccagccagcattcccagtgggggaaactagaagacaccagcctggagaggctgaatattcaggagtccctgagatggggaatggaacagaggaaagtgtcttttgactcatcttaagtactcccctccccaaatagaaacctcaaagactgatccatttcccctagggcctgggccaggagtagctcactgctcactgctgaggagaaaggcacaagatataatgtcataagagcaggacagtggctcagcctacagagttccctataggggaaagaaggcaggaaataggcgcagggtctggtcctgtccctgcaccaccctgagcagctagtcttgggaagggattacaggccctgggccataggctgctcgccattctgctttcctatcctgtttctctccctgtgctgctcccttttagccagggctgagaaatgttcagcacctgaggcaaaactgccatagtacctctgaaagctgaatcaagggggaagaggcagaagaacacactaatagagaaaattttccttgctacgggtgctctttcacacccacctagggtaagtcaaggcaacttgtgaaggtgctttgagctgttccttcaagcaaacacattttcattacataatggcttaacgcaagggtgcagggaaggaccaccaccaactttggtgacatatttgaatctgggtgttcatcctactctgatattcaaaaaagcatagaaaaaggtctgatttctgctcatcaccagcccaggatagggttcaggtgtgctctgaccactgccaattcaggaaggcggcaccatggccaaaagctcccagattatttggaaaccatgttttcttcctagtccatggtaacaagaaaaagccaatggaagcatcattccaaacaataatctccaaagatggtggcaaccaagtgtcaaatggggactgcaggcacagaagagaccaccccaaaccctgcctgggtggacgaagcaggtatgctagaatagtcctgtcctgcagaatagggaacggcagcttggtcgatctgtgccctggaaaaagaaaatgagttgcaatagaagtgactctaagacagacaatgaacctactcttaagagagacagggccaggcacggtggctcacgcctgtaatcccagcactttgggaggctgaggcgggggggcgggtatcacctgaggtcaggagttcaagaccagcctggccaacacggtgaacccgtctctactgaaaaagaaaattgaaaaattagccaggcgtggtggtgggtgccggtaatcccagctactcgggaggctgaggcagaagaatcgcttgaacccagtgggtggaggttgcagtgagctgagatcatgccactgcactccagactgggcaaaagagcaaaattccatctcaaaaaaaaaaaaaaaaaaaaaaaagagagagaaggctgaaaaagcctcctgcttagagtatacctcacacccagctgaggaaacatctgttatgtaaacgcctcctgcctgagataacaaagaagctctagctatctcataaactgtaccccagcttctctaaagaatcaggacaggtcagagctaccacacaatgtttaagtaaagttgaaagctagagagtttagaaaaggaaatggttaaaacaattcctagggtaacatttataacaagggcaaaatcattatgtaatggaattctctggggtcttcaaattaaaaaccacaaaaggaagataagaggaagaacaagaatcctgaggctcaagctgtctcatggtctatcttgagttgtgctctatggagcaagaccagatgtcaaagttgtgcacggcctgttccatatcccaagaaccttctgaaggctggaatccccttgagactagaaagggtccaagttcagtggggttttggagaaccattcatctggctgccctgggtgacagtgtcggtgctgtacaagctgtccaagaagactgaggacaattctgcaaccatattcctgtcaacagttgtctgggccatgccatagatggcaccctacaaatccaaagaaagagacattattagtgaggccaggtccaaaagcaagaataaaactgcagcaatgagccccttctccccgagtcctagcttcgcatgtgcactgccctaccccatttccacctaaggcatcccatcattctatcagaaaaacagctggcatagtcaatttttcacagggactttccagtctgcctttctgcataaagggactagcctaagaaaattccagaaaaaacatgtttactatctttcctgtgacaaaattttcttttcaaatggacactaccaccagctgcttttatacagaagtctctaacttacaaggtactttatagtgtatctcatttgagacttcagcaaccctaaggggtgggtgatgcagagatcatcagctccagtcaacaaataaaagatgtctgtggcaaaggggcagaggcaggaacagactccgggtcatatgattccttcaaactctccaccaacacctaaatttccaagagaagaaaaaaaactccaagtgtccctaccattcctgtggtcttcgctttaggattcttcatgatttgagtgacagattctcgaatgtcctttaggaattgtatagctactcgtttccgggcgtgtagtaatgtgatgcagaaatgaatactaggaaagaagagacagagagagatgaaccttgaagaaagaaaaaatgttctaaaatgatgcagccccaaatacgggaatttcctggttgccctttcacaatatttctgacaagtgtagtcatccaagttgttcctagtcctgggaatctcggctctctcatgcttggggtgtcaggcatgggctggcctcagagcttctcggcatgactgagaaccatgctaagaggatgaacagtgttggctgcttt

SEQ ID NO: 95097 - DNA, 43485 bp, Homo sapiens
  misc_feature (1)...(43485): n = A,T,C or G
ccatatcactatcagcattttggtcaaagccattcaacaagtctctaggaagttccaaactttcccaaatcttcctgtcttctgagccctccaaactgttccaattgttacccagtttcaaagtcgcttccacattttcaggtatctttacagcagtaccccactctaatggtacctatttaccgtattagttcattttcatatggctatgaagaaacacctgagactgggtacaatttataaaggaaagaggtttaagggatcacagtttcacgtggctggggagacctcacaattatggcaaaggagaacaaaggcacaacttgcatggtggcagacaagagagcatgtgcagaggaactccactttataaagccatcagatctccgagaccatcctggctaacagtgaaaccccatctctactaaaaaatacaaaaaaaaaaaaaaaaaaaaaaattagccgggcatggtggcaggcgcctgtagtcccagctactcaggaggctgaggcaggagaatggcgtcaacccggcaggtggagcttccagtgagctgagagatgccactacactccagccactgcactgcagcctgggcaacacagcgagactctgtctcaaaaaaaaaaaaaaaaaaaaaaaacccaacagatctcatgagacttactatcatgggaatagcatgcaaaagacctgacccatgattgaattcctcccccaggtccctcccatgacacgtgggaattatgggagctacaattgaagatgagatttgggtggcgacagagccaaatgatattacccagctttaacaaatcttaacatttaaaaaacctaaaccattatagatataattgaagccaaacctgcttctgtcccaccctttcaagaggtgactataaccataaatttagtactcatcattctcaagcatttaataccacttctacatgagtatgtaatattaaacaatatgtgttattgttttgcatgttttcaaactttatttacacagtttagggaatataaaaatctcagaaacttagtgctgaaaggaaaaagaaaattctgatttgaaaaagaattctacaattcgctatttcctttcagcattaagtttttgagatttatcaatgtcaaaacacttggctttatgtagttcattcattttaacaaaaggggaaaaacatcaaaaaactaaaaacagtgcaccatatgcaatcttttataaattacaaggtcacagctaacctttctgtcctatcactgttaataccaaaggaaatgaaaactcagagttcaaataacctagaaaaaagcaaagaacatttgtacagaaagttatataatcttagaaaaatttttgtacctgtaaagatgtaatgaaaggttttgactatatccccataattttatctgtgggttataatttcttgaaatcaaccaaatagtgttagattctgccatcacctaaaacatctgcctcaaccacaagaagtttaaacattaagaagagctgcagaaaccaggacctgatatgaaagaattcagacttttactgtatcaaaactccacacaggactactcagaacagagcccatacaggctataaaatgtcattccacatttccacatacagcagctggggcaaggggtggaatcataagtattttggtagtgttattgatgggaagttcttgatataattaatcaaaagtttgtgccattttaaaacccttaaaaggatttaacaatgtctagcacaaaggagaaagtgacatttccaaaggttgtttagcaatgacatatcctcaagggtggtcctcggggaaaaacagaggcagaagcaggcctacggcataaacactgcactttagaacagcttggcagtctctgacggggagatgatctgtcagagggcagggctgggaaaaaaacagtccagtcctactcagcaatctcaccactctacttccattcaggtcttcactctagctcagaattccttagacaagaaagtgaaagtatcaagaaaataaaaaagaaaaaggtagcccagatgagaattttccatggtggatataagaacatagaggttgtttttgttttgtttttttttttttcaacatgacgttacggaaagagcaggttttggaatatgcagctcgaggtgtgagtcccagctctatcatgtgggagccacatggccttgggcaaggcagtcaacctcttgatgctgtttcctcatctgaaatctgggatcccactcagagttacgtgctagagacgtggcaagcaccaagcacagaacttagcaaacacatgatcttgtatatagtagacatcattattgttttcccctctattcttcttttcaatttctgaatcataaggattgcctgagcctaggagatcaaggccagcctgggcaacatggcgaaatgccatctctacaaaaaaaaaaaaaaaaattatctaggtgtggtggcaagcaccagtggtcccagctactcagaaggctgaggtgggaggattgcttgagcccaggagatcaggatgcagtgagccatgatcctgccactgcaccactccagcctgggtgacagagtgagaccctgtctcaaaaaaaaaaaaaaaagcagcagactagagaagtcattaaaatgttatgaaaaaaatatactctatagttctataatcatctttaatataacgatatttacagaactctggttatcaaaacaagctcttattctcaaagaattcggtctagaagatgacttaaacaaaacattaatactaaatattggttgttatgcaatgcgtatttttctgaaccttaactgtacatgaagtggtgtgttaaactcagagaacacaaagagcaagaagaaaatgccccaccctgcccctagcttctgtaagctgggtgctctctctctctctctcacacctacacacatagcctatgagatgcttgctttttccattttcgatatctacctacttcctacatatttctttcactcacatctcatgattaccataaaaaaactgttgtaataataaaagtaaaattactctgaaataggatctgtatctttccccccccacattttggcattggctaagttgggagaaaggaataaaggaagatgactcatcctactggatttggaagactcatctgctttgcccagtactatctgactacattatcctatcaggcttgaaagtgatggggcatggcctgaccacactatctcctactttgcttctgttgatcttatctcccactgagcctttagcattctgattcatcaggctccaacctgcactcattgcctttgaactcacctatccacgggatcatcatatgcttcataacgatgaagcctgtcaaaggagattacacaaagaataaaataacgtggcatactgatggcaaataggataatacttaaaatcctgtaataccggatttcttctaaaaagcataagtcttccacctccattgacttaactgttttcagaacaggtagagaagttatttaaactattattttatgcagaagtaaaaataaaatcgccatccattttatggatgagaaaacatcacaagaggttaagagacttggtcagggtcacacagaagcaaagctagaacccaagtcctgtaattaaatggtgttagctgatttttttctttaccatccttttcatctcaccctttgagatgctggcatataagaccctttacttcgtagaaataaactttacaatagtgatagtgagacagattgagctagaaaatgtgaaatcaaactaacctgcaggtagaatcgcatattttatgactaaggcatctgcttagagtttgaaatttctcaaatgcccactaagtcagggaatgcagcagaaatacaaaggacatgattctatttttaaaaatgtataaaaaaaaattactccctagcatcggatccttgtgaacaggacaggcctttccattgcttgtgctttttaattaaactatacttcaaataggccttcctgtttatcaaatataaacttttaaaaattaagagtcccttggtttaatttttggtttaattttacctctgaaaggttgccaatatgccttacaaatctaggaaatagaaaatctaaaatccctcttccaacagtgatctttttcctggctatgcttgtatccatttgatttaaacgaaaattaaaggaattgggaaaatgttaggagtatattttaacataggatgaacagatcaagtcacaaagccagagcaaaggaacattatgagacaagagcaaaagtaaaattaaataagaattctggcaagaattttaaaaactgaaaacttagaaaaaaaatcaatcattacaaattgttctgctgctaatacacaatgactcatgtaagcatatggtttattattaacccagaaatgtaaaaaaggcaagaattacaagtggtcagagaaagtctcttcctggctgtgtgatcttatcaggtcacttctgttcacttgagataggacggggtaagaagaggggaggagtttaataatttcggactcctccaggttccatgatcgtatggaacagggcagtctgttccctaatgctggaggagtagagcttggagagatttgctgctgaactcgctgcgctaaccagacacgtaatcacagtggcttcagagggactcgcacaacaatttccattagctacggacaagcattccaaactttagcctttaggtttaatcattgacacaccttccctggtcactgagtctcctctagaaactcagtataaacatccaacgatgtgttaacagggtgttttgtaattttcttttgaagattattctaggtggtgggcgtcacagggtcaataaaactatacatttctctcaaagactgcaatcctgatggcaaagctggaggaagctccgggaaacctgtaattgtgggaatccaagacaaaaaatcccccacagctgggctgtgggaaggggccctacctaggagaagaaatcaaatcccctacagctgggctgtgcgaaggggcactacctaggagaagaaatcccctacagctgggctgtgggaaggagccctacctaggagaaatcccctacagctgacaggtgggctgtgggaaggggccctacctaggagaagaaatcaaatcccctacagctgggctgtgcgaaggggcactacctaggagaagaaatcccccacagctgggctgtgggaaggagccctacctaggagaaatcccctacagctgacaggtgggctgtgggaaggggccctacctaggagaagaaatcaaatccctacagctgggctgtgcgaaggggccctacctaggagaagaaatcccctacagctgggctgtgggaaggggccctacctaggacaaatcctctacagctgagagctgggctgtgggaaggggccctggacagaccgctgggcgctgctgcaggaatccccaaacccaggcactggctgcagggaaaaatcaagcgggtgactggcggggggggggggtgcagcgtggggctgggggacagggagtgcggggggcggaggctgggcaggggtagtgccaacggacacctcatggtgtggtagcctaaactcagagcctaaacgcaggaccagggctaggagcccaggaccagaaggcaaaacttcctacctgatttatggatgggaacttgcagcccctggaggggaatggcttcggtctggagctctacgcactagttctctgggaggacagagggcaggaaaggggtgcagccaaaatcaaactcggttccacttggacgagcagtggggagattcgctgtctaaacaactaaggagagtttttaaaaccacttaccagaatctagagtgggaattaaaatctgcgtgggcttcttcagattccacagaaatgaggactgccacaccttctccaacttttgcaggctccacccaggmtgtgcgcctcgctccacccaggmtgtgcgcctckctccacccctaggcgaaggcactagaatttcccaaattaagaacgaagaggaagtttggaccttttcggccaccgctcgcttcaatatggctgcccccagggagagacgaggctaccatgaaggagccgagcgcagaccctgagtccgtcacccatggatcgcagcgcggagttcaggaaatggaaggcgcaatgtttgagcaaagcggacctcagccggaagggcagtgttgacgaggatgtggtagagcttgtgcagtttctgaacatgcgagatcagtttttcaccaccagctcctgcgctggccgcatcctactccttgaccgggtgaggcccctttgcgcctgtccatcgcctgccttctagtgcgaaacttyaggagccctgttcccatccagtgacgaccggatccagcatgtctgtgtttgctcctctgagrggtggtctctgtttctttatatgtgaaatttaggggattagatcagtgcttctaaaagtttaacrtggctattaatcagctgagsatcttttaaaatacagatcccgattctttaagtgtagggtagggcctgatactgtgcatttctaacaagtgcccaaatgatgttgaaactgctgacctgggaactatcttgtgtggcaaagtttagaaaatttgattttattatatgaatactaagggaatctaaagactttgtagcttgctaaggtattgaatgccggaatccgctcatcaacagctctggcaaatcattgttactgcatgcttgaacatcaccagtgttaaggagtttactgcctcctagtgagcccctccattattacaactctagtagttttacgcagagaaaagtacgatcgtatataatttaggatggttagacttttttttttaactttatgatgggtttacaggggtagtaaatgcattttgacttacattttccacttatgacggatttattgggatgtaaccccatcataaatcaagaagcagctgtacaagccatacctccttatttgcaggttcagttaccccagtcaacagcagtctgaaaatattaaatgaaaattccagaaataaacaattagtaagttttaaattgcatgctgttctgagtagcgtgataaaatcttgagccaaccagctccttccagaatggaaggtgaatcatccctttgtccagaatattccactatatattcttgctgccctttagctgcttggtagccttctgggttatcagatcgactgtggtggtatcacagtgcttgtgttcaagtaactcttattttacttaataatggccccaaagtacgggagtaatgatgctggcgatttggatctgccaacagtaagttttaaagtgcttttttgaagtgaaaaggtgaaagttcttaaggaaagacttaaggaaagaaaaaacagcatatgctgaggttgctaagatctacggaaagaatgaatcttgtcagtgaaattgtgaagtgaagaaggaaaaagaaattgatctgaggtttcaggcatccactagggggtcttgggacatatcccctgaggataaggctgcttgggagtgatactgcttagattaaaaaccacgggctatgtgaccttaggaaagctatctcaactctgccccttcctgttctatgaactgaggataataaaaagtatctgctttatagggattttgtgtggagaaaatargataattttttttgaaatatttggctttgtgcctggcccatgcactgtaaaagttggctgtgtactgattttattcgtagtattggcttaagagcatggaagacagcacattgttaggctcattctttaggtccattattgactgatcatttatttgctgatctctcaagttagcagggcctgttcatttttaaatcacttccatcacctycagagcaatggcattcttgcccacaaactctctcttgccccatttccataactctgtctcgccttgatttttgcaatggttctctaamaagccacttaactattcttctccaaaccatgtttgacaaattgcaactctgcttatctctcacctatgctatgttttattacacatttttctacatcagaaaatccaaatgcttactctagtatacctttcaacctttttttcattgcttttcttcatctttagctagttactgaaactaaactgttcttttcatcttgtatttacttgcttttgctcatgttttttggcggtttttttcctgaaatgttttcctatctctgcatatctgagacatgattcccaaaactcccctctcccacctgaayccacaaacacatactacctacttggaagtaatgactgcttctgtactggttagacttttatttcttatcttacacctcgtattatggtttattttaaaatctgccttatttcagtaaggatttggggcaacttacaaacaggcaacacaagaaaaaataaaaagtgggaaaatctggataaagaaaatatagataagatgaagccagcgatggcattagttgccaatcccaccactagatcctgtaaagttgctagaagtgggccatacatttggctctaagattcagagtagccagcacaatgtcagatacgtaagtcaccatcaccgaagtcatacaatgaagtcaaaatatttatttaggacatgcatagcaattcccggttccaagggcagacagcagagtctcttgtggatccatcgtataaattatagttactttgagtatagtgatttctgttcatgtggtttcctgcatcccctttccagtgtccttgaggggtaggttctgtgtatacccaaagtacctaatagaactttgcaaataaacatttgttcaatttaagttaatattaaaatgtttgccttcatgaaactttgacctttcagtcttagctccatccttcaggactacatctaaagtctaattcagaggtcacaaatttatgcctctagagaccaaggaagtattataaatgtgtaaacggcataggtgacaataaagggtagtaggtcttgtgtggaattgggacagtgctgtcctacaaaagaaattaaaattatttttttttcatttttaaatactgtgctagccaaatagctagagtacaactcaggtgctgctagtattatcccttatactaatccctttttttcttgcaaaatcatgaccatatttcagaagatgtttatcaagtagttttacctttcacataattttctacctcaagttatttgggctcattcttattctgggttaacattacccaaaaacataccgaattgtttttattaatacttaaaatcctgacttgggattattaatttaagaaagcctamaatatactatgcattatgcttattatttttgtaaaatattatatgaaacttaaattatgttattttttattttagggtataaatggttttgaggttcaraaacaaaactgttgctggctactggttacacacaaactttgtgtaaaagatgatgtggtaagttttaaaaaataaatttggaaataaacttttaaattcagttactttaaatacatatgacaagaatagaaaattcaaggtaatttatatgcagagttataatggctgaagattataaaacctagagagctttcattacaatggctctttttgggttgtaggagataaaaagtatggaagcattacttactgctactcaacaaaacacatcctcttggacacagcagaaagttcatggatattggacacctattggatccaaattttgaattttaattctgctatttgaaaaccctgtaacctagaacaaattatggaaagagaaggggattagcactatctctgtgttaccagctttactgatataaataaataatacattacttacctgcattgctttttkaaaatcttcatatctctgctgggttatttagtttcctaaggtaaagagtttagatgaattcataagtttttatcagccaggcacttttcattcccagtgaatttacaaatccaattctgtttttagcaaaaaagataatttatttaactggaaagggygaatggagctagaatcaagtattgctggttcagatgttcaaatcttgtcttcagagtacccacttcatcttcatctttaggcactggttctctttgcagtgtgcctttattctcttctgctgcagataatctttgttgcagaaatggtagctgtcagcaacaccagtagaaaaagaactccttttcctgcaattcatgtgtccatcttagagaaggacttggaattgtcctgcttagattaggtgctctccctcttaggttaattatttttgctagtggaatgtgatgatatccttgatcagacataagcaagcacttggcacctctgatattgtgatagggagagtgatgtgtgacagggtaatgattgacagccccaccagaaatcaaatggtgtgaaggcaggacgatgttgcccggggatgctgggcagacagaaataataactgtcttgtataaattctagctcagacacaatattacatgtttcactaggtggtcagactacgccgcaggatacactgtaacatgggtgcagccaaggttaaaaggcaggcaagtgctacctagggaagagactagtacctgactcaaggtcactaacaaaaaacacgcatactaggctcaagtgttgtaacatttgcttatagcaggagggaagagactacacaagatctagccctttgcaatgtgtcagtccccatggctagcagattggttccacagctgatcagggcagagtgatggcatgtaccccactttgtgctgcagtagctcccagaccctgaacactgccccatagggtctgaaatacagaaagctaggaacgtgctcaggggccattggttctcatgtagctgagcagttccaaggttcctctcccaaagttaggagatagcaaaaacaaacaagtgaacagggaaaaaaaaamaaacaaaaaaactgcaagttgcaattgttacaacaactgtgcctgttacagagggaacaggaactcactggctgtgctctgagctctttgcatgcactgctatttgwgagcttactagtgctgctggtaagcactggtgcttggtacaggatgcttcttgggaacatgggtggcagttaggctttgtttggacccttctctcacattacatttgtctctatctcaatctaacaaaaaatttaaacaatcctaatacagtttttgtatactacatttcctaatgaaaaatccgttatggaattaaataaagtagtagtttacttcttcaaagcacactaatargtggaaagaatggtatagaagatttacgggagaactagaaattttaagaaaataagcaaataaatttttggtgaaaaaggaccaagaaagcagagggaaaagttactgcagaaaaaatatgctgagtgattctgaaaatttctaagagaaattgaagttatgtatggggtaaagggtcgccaaaggacaggccatatacttgcatctgataccactgttcatttatttagattgtagctctgaagaaagcaaatggtgatgccactttgaaatttkaaccatttgttcttcatgtgcagtgtcracaattgcaggatgcacagattctggtaaaattttgttgtaattgtacttgaatttatagatatgtgggtagatgtarttttaagcttttaacctgctataaatatcaatgagatattaccttattcaactagttatgtatatattatttattggtctgctcaatctattaatttttaatattagaaaaaaagagtagctaatcattgctaggaaaatataagtcccaggttatgcttcctgttttctttcttaacgtttttatttataaattttacttcagcattctatagtttgtttttgtttgccaagctttaagaaaaaatactgtggaactacatgtaaaattaagagttttaaagaatatttcatttttcccatttaaatgagcatgcatgaggtaaacatctgtttagtcttgattctcctttttataccttttatatatttatatataaaactgaattgcattttaagcaacaataatgtattgagtctcagtgtgtcaagtactaggggcacagtgatgaacaagattaaagactgtcttggttcctcttccaaagttaggagacagcaaaaacaaacaagtgaactggcaaaaaaacaaaaaacaaactgcaagttgcaaaatgttctaccgaaggaaaaaacaacctggtaatagagaacagtgcaaaaagcagctcacttgaagataggcttctctgaaaagctttctttaagctaagacttaaaggaacagaaagagctaggcatgtagctgggaaatgaacattccatgaagatggaaaagtatatacaaagtttcagtgggtctagagagtggaaagaaggtgccagaaggaggctggggccaggtcatttaaggctttgtagaccagattaaagagtttgmatttctttctgagttcagggaaaagttattgaagggacagttttaagcaaagagtggctttctaggtttttgttctgaaaaactcagttctgcttcagcatagagaaaggagtgcagtaagtgaaaagatacgagttaggagtagtttgtggtgataggttggtgtaaggtgatagcaccaaagcaggtgagaaaggaatagattcaatatgtatttcagcatttgaatcaacagaattgtaaggytgtctggggaaggacagccagagggaggaggagaaagaggaatcaaggataactacttaggtctggctggagcccctagctgtatggtagtcgcctttatccagatggggtgtgctgaagttgaagtgtgtccagaattggttccttccagtgggttattggtctcgctgacttcaagaatgaagccgtggaccctcgcagtgagtgtgacagttcttaaagatggtatgtccggagtttgttccttcagatgttcagatgtgtccggagtttcttccttccagtgggttcgtggtcttgctgacttcaggagtgaagctgcagaccttcgcagtgagtgttacagctcttaaaggtggcatgtccagagttgtttgttcctcccagtgggttcgtgstcttgctgatttcagaaatgaagccgcagacttccacagtgagtgttaacagctcataatggtaatgcagacccaaagactgagcagcagcaagatttattaagagtgaaagaataaagcttctgcagcttggaaggggactcaagtgggttgctgctgctggctcgggtggacagtttttattcccttatttggccccacccacatcctgctgattggtcgcttttacagacagctgattggtccattttacagagtgcagattggtgcatttacaatcctttagctagacatagagcgctgattggtgcgtttttacagagtgctgattggtgcrtttacaatcctttagctagacacagagcgctgattggtgcatttttacagagtgctgattggtgcgtttacaatcctttagctagacacagagcgctgattggtgcatttttacagagtgctgattggtgcatttacagtcctttagctacacacagagcgctaattggtgcgtttttacagagtgctgattggtgcatttgcagtcctctagctagacagaaaagttctccaagtccccacttgacccagaaagtccagctggcttcatctctcaatccaccctctaaacaggacacctcaactgctgctgggaatttggcgatgacggctctagctacttcctgctggataggggtgaagaaggggccctgcagttgtagtgtcctccagaggggaactctttagaccagtgaaagggccagtgggtccgtccaggggtcctcggtagaagttgttagttgagctcgtttggctacagtatatagtcctatcrcaaagagtatggttagtatgctgctagawaatatgatgaaatagtaaaaggattccattaaaggggtaaagagaggtgttaaagattatgtaggttttcacttatattttttaaggaggaatgggtttttcctcaggatcagaggtaagagcctttttagtctgggatgtttccttccaaaataggagatgcaagtcctccaayggttcgcaggtgtatcgaggctggtctggctgatcttgggactcctgagctgatggtcccgcaggttcctccgggggtgtccaaaatttaactggggtgtggtgaatccaagattccactcctgccatcttaactgcagtgggggtagagaggattaccgagtatggtccttcccacaaagaatctatagatggggaggtagaggggagagatttgactaacactggatctcctggttgaaacaactctgttcccttttctctgtgacatcyttcaggtaggtttttaaggtttcrttgatattttgccaaagaagttatatttttgaccaagttggccatttcctgatcaagtaggagttcatttgtgagaaaagttcttccatacagcatttcatagggactgagccccattttgtgaggacaattttggattctcaacaaggccatgggcaaaagagtaggccatgggagatgagtttcttgtgttagttttcttaagtgcctcttgagtgtttcatttgccttctcgaccttccctcaggattgtggcctccaggcacagtgaaggtgatattgtatccctagctccctggaaatgtccctgagttatcatggctttaaaagccagatcattgttgctctgtaagctttggggaagcccaaatctaggaattatttcataaattaggactttaatcactgcctgagccttctctgtcttgcaggggaragcttctatccaatttgtaaaggtatcaacacagaccgacaagtattgaaatccctttgacttaggcatatgggtgaagtctaattgccagtcctctctgggatagtgacctactctttrttccccaaaagaggccttaggatgaactaagggattattcctttggcacacccctcacaggctttgactacctgtcggatggcctggaggagatttggccctgtaaatagggatttggccatttgatgcgtgttttcaatacccatgtgaacagtttsgtggagggttttaagtattttccactggctggctttgggtataagtacctttccttcttctgtcgttaaccacgccgaggggagaaaactatgcccccgtgaaagtccccactctgtttcggttggggaatactggagcttaacctcttggagggggttgttccataccaagggtccttccgtaggtatttctaatgggatgttctgcctggcagcaattttagcctcagcatctgcccaacggtttccttctgccttttctccttcacctttccgatggctttggcaatgtaagactgccacctccttgggtttttacactgtgtgtagtaactccataatttccttgtggtatttaacgggagttcccccagaggttaggaactccctttctttccatattgcagcatgggcatgtaggattagataagcatacttactatctgtaacaaagtctcccaatcacaactgaggaggtaggagaaatacctggttacaggctgtcccaggattccttggatggtaacggaccttgaggacaactccctgagacaggagattaacactgagaaagccacaccagtgtccaggaggaagtcaatttcctggccctcaatggttaaacatgcccagggctcagtgagggtgatgacatgagctggcacttgcccccggcaccctgagtcctgttgttgggtcagctggttgggggcttctggctcagagaacgtttgttctctggggcagtgcaccttccagtgattgccctggcatagcagacatggacaagcgggcagcttgtttctcgttggacaatcttttttaaggtgtccttgcaaaccacactggtaacaagccccaccgggtgattggcctgctccattttatgtcctctctgaaccatcaaggtttgtttgtctgatggccatgactaagtctgcagcctttctcggatctcgcttttccttttgggcctgttcctcttggtctctattatagaacaccaacgttgccaggtttaataatgcctccagattttttcagggcccagggcttgcttttggagctttcttctgatacctgcagctgattagataataaactcatctttaaggatcagttgaccctcgagtgagtcgggtgacaggggagtatattttcttaaggcctcccatagccgctcgaggaaggcaaaatgattttcttcctttccctgagttatggtggacatcgttgagtaattcatgggctttttcctaattctccttagtccttctagaacacatgtcaacagatgtttatgactccagtccccatgatctgagtcgaggtcccagtggggagccatactggggatggcttgctgactggtggggaatttgtccctttcttcggctgtcattctatcatttacttgactgagatatcaggtatctccaaactctcgggctgcagctaaagccacattcttttcattaaaggccagggtttgatctaacagtagcatgacatctctccaagagagatcacaggtttgccctggagcctgtaggacatctgtatacctatcaggatcatctgaaaacttccccagatgtaccttgatctgctttaaatcagagagggagaaggagacatgtacccaagttgggccaaattcccctcccgctacagcttgaaggggacataactgatagcccaggcgtttttgtggtsctttggagatttctttgcttgtttccttctgggagggggagattagaggaggcttatcaytaataggaaggggagctatagggatgctaggatrtkggggtaagctgagaggtcctcytgtaggatgtaaattgcaagtttgcatagttrtgtattctccttcaatgaaaagaaagcttggacataagrtatttcactccatttaccttccctgttacagaaaagatcaagctgcaggatagtattgtaatttatactgccctcaggtggccatttttccccatcagagagagaatattggggccaagctgtgatgcagaaaaaaaaaaatgagccgcctctttttcacggtttgcgggtcaaattggtcccaatggcttaggatgcatttcaagggtgaacctgttgatgcgtgagtgtttggctgacaggtgtctggtatttagcccccaaattctaaggaaaaataggacagaatagcaagcgaaagcggtccaatggtactcaccacttggcaataggcgattgtcccatctgggtcgccaaaatgtgtcccatctgggtygccaaatgtgtcccatctgggtygccaaaatgtgtctagaattggttccttccgatgggttcttggtctcactgacttcaagaatgaagttgcagacactcatggtgagtgttacagttcttaaagatggtgtgtccggagtttgttcctgcagatgttcagatgtgtctggagtttcttccttcttgtgggttcatggtcttgctgacttccggagtgaagccacagaccttcgcagtgagtgttacagctcttaaaggtggtgtgtccagagttgtttgttcatcccggtgggttcatggtctcgctgacttcaggagtgaaactgcagacattcacagtgagtgttacagctcttaaaggtggcgcgtccagagttgtttgttcctcctggtgggttcgtggtctcactgactttaggagtgaagccacaggccttcgcagtgtgttacagctcttaaaggtggyccatctggagttgtttgttcctcccggtgggcgagtggtctcactgactaaaggaatgaagcckcagacctccgcagtgagtgttacagctcataagggtagtgtgggcccaaagagtgagcagcagcaagatttattgtgaagagcaaaagaacaaagcttccacagcttggaaggggacctgagcaggttgccactgctggctcgagtggccagcttttattcccttatttggccccacccacatcctgctgattggtccattttacagagagctgattggtccattttacagagtgctgattggcccattttacagagtgctgattggtgcatctacaatcctttagctagacacagagcactgattggtgcgtttttacagagtgctgattggtgcgtttacaatcctttagctagacacagagcgctgattggtgcgttattacagagtgctgattggtgcatttacaatcctctagctaggcagaaaagttctccaaatccccactcgacccaggaagtccagctggcctcacctctcagaaggaatggaaatcaagaatgtgattcatatgttaagtgtgaaatgtctgttaagacacctgtttttgtctgctagcgttgacataacaatataacacagactgggtagtataaacaacagaaatttatttttctcacagttaggaggctgaaagtccaggatgaaggtactggcaggggtagttccttctgaggcccttgtccttggcttgcaggcagctgccttctccctgtgtcctctcatggccctttctctgtgtatgcatgtcacttgtttcttctacttcttgtaaggacaccagtcctgtwggatcagggctccatccttatgatttcatttaacctaattaacaccttaaaggcctcatctccaaatatagtcacattggaggttagggcatcaacatatgaattttgaagccctgtagacacaattcagtccgtaaaaacaccacctaagtgaaaatttcaaatagacatttgggtagaagtctggaactcaggggagccatgtggactgaggacagacattgagaagatgccaatacacaattattattttaagccatgagcctagttgaaatcacctgtggagaaagtacagaagaaaaagagaagagggcttgaggaacacgagcatttagagacagtctccaaaacatggtgtttaatcatttagtggctcatggcttcagtctctgctctaaccctgaacttttatctaaccttattttagtctcattataccacatcacatcactgatgtgtctccagactttaactctcctgtttctatatccatgttctgttctctgtgctaatcctgactgagcccagccatgctcttctttgggcctaagcctcattggaaagctaacatttcagggagctaattgaagtggacttagaggaactgagaaattcactcattcacagcccctttttgaggggggtccttacctaaggagcttatatttgtattctaggggacagaggcagacaataagtatgtaataaaacagaatttctcactgtgagatgtgctgtgaaggagataagaagggcactccactagagagtcaggggagagctgcatttaaagaggtggttaaagaaggcctttattcgaaggttgcagtgagccgagattgcaccattgcactccagcctgggtgacaagagtggaactccatctcaaaaaagaagaggacctttttaggtagtagcattgaatggaaacaggatgaatgacaagaaaccagccaggaaaagagtagtcctgacagaggaacagcaaaaataaagaagttgatgcaggaaagggtttggagtattcaaagaacagaagggaagccactcaaggttagagaaaatagcaagggctggagcaaatagaacatcattagtcatggtttagagcttggattctgtcactagctagtctgtaagaatggtttgaaggggcaagagtgaaagaagagactaattgggagactcctccagaagttaaggagagaggtgatggagacttgaaaaagagtgggcagtggatgtggcaagagctggattaatttgaggtaatcgtagaggtagaatcaatgggaattgggtataggggatgaagaagtagaaagcatcggggctatctaggtttggagcttgagcagctagatagatgatggtgtcattttactgtaattagaaagaccgggccrggcgcggtgrctcacgcctgtaatcccagcactttgggaggccgaggcgggcggatcacgaggtcaggagatcgagaccatcccggctaaaacagtgaaaccccgtctctactaaaaatacaaaaaattagcygggcgtagtggcgggcgcctgtagtcccagctacttgggaggctgaggcaggagaatggcgtgaacccgggaggcggagcttgctgtgagccgagatcccgccactgcactccagcctgggcgacagagcgagactccgtctcaaaaaaaaaaaaaagaaaaagaaaaaaagaaaagaaaagaaagactggatgtgagtatgtatacatatgtgtgtgtgtatatatatgtatacacatatatacacacacatatatgtatatatgtatgtgtatatgtgtgtatatgtatacacatgtgtacatatatatgtgtacacacatatgtatatatatgggtgcgtatatatgtgtatacacatatgtatgtatacatacacatacacacacatatacacatatacacacatatatacacacgtatatacatatatacatatatgtgtgtatatatggtatttaaaccagggamtctcaaaaggagagcatgtacttagagcaaggtttttcaaccatggcacagctggcatttcaggtcaaataattatttgtgtgggggctgtcctgtataatggagaatgtttaagctgcatccctggcctctacccactatttgctagagatctcccttcctcttcccttgagttgtgacaaccaaaaatggcttcagatattgccagatggcccctggggttcaaaattattcttgcttaagaactactgagctggagaaaataagggacccatgtctgctccccagggctctctgacatttagagactgacaaaataacttacaaagtcacctcagtcagatcagaatttgtgtgcttgctatgctttcttatatcatttcaacaaagttttttaagcaatagaagggayattgagaaacattgtactcattttaaaagattttgttttgtttatttttatacaacacaattagaagaatgattgttttttggttacattctgctttctggaagcaatcactagccaaatgtcactgtttgtnattgaattctacttttactctttctcaatgacacatccatagttcatatttcaatatttttcctgatgttaggagtttgatcaaagtcatttttaagcatagtccgtattggctagacgaaaaatttttttaaaaaccttaatagcttttagggttatatatgtttctgtagtttgtggagccaaacagatgatctsgttacccacagtatcaaaatgtaacaagttttattttcttacagcattccrtggcaatagattctggtttcaggaactctggcataacggtgggaaagagaggaaaaactatgttggtaagatattttgtcaaagagtaatttttttagtgtaaagtgatccagaaattgaataacctaattagactcctgcctttaatgtctcctttctcaaatcttcttgccattctcttactcataaaccctcagtgacttactccttcctacagggcaaagtccagagtttggatttacagttgaggtcttatttaataatattcttctccacttacttttaacctgattcttaactctgccctcctcatcctaagtaggcaaggccccaaagcactatgacatcatggaaagagtcacagagagagttcaaagtcccctttactgatacctgctggatcacagctgtgtgaatttgggcaagctcctcagtccctcagggtttgaattttctcagcagtatcagtggtccagctaactactgtcgtagggccacattcagcccacatggggcaggatcccactatactcatttgattacttattgtctgaggttgcttttgtgagacaatggcaaactttagtagttgtgacagatactatatgccttgcaaagtcaaaaatgtttactatctatccttttagagaaaagatttgctgacctttcgactagatgatctttaagacttgctttctttttgagtccttctctagccaagctagcccttagatatttctccctattctgatctcctgtgatatttactgtttggcatggcatgtttttgaactatttgagattaccctccttctaccttcctatattctcctattttctatttttaacaataacctatttcccaaataggggtggatgacaaaagaggacacccttaaagcatggctgaatagaaaatcaaagcctggccaggcgtggtggctcatgcttgtaatcccagcactttgggaggccaaggcaggcgaatcacgaggtcaagagatcgagaccatcctggtgaaaccccatctctactaaaaatacaaaaattagctgggcrtggtggtgcgtagctgtggtcccagctactcaggaggctgaggcaggagaatcacttgaacccaggaggtggaagttgcagttagcagagatcacgccactgcgctctggctggacagagcaagactctgtctcaaaaaaacaaagaaaagaaaattaaagcccgtagtactggtttatgtccccatctcactctttactccatctggtatcccagatgaaagcagagccattctttcaccttcttctttgtttccatattcaattcgttataggtcctatccatgctgcccctcgtttctaatacttgaccccaccctaggtcttctggcactgcccagccctcaagatccctaacctcagtctttaccattgtctcccgactagtcttcttactttaggtcttctccttgagtccctccaaccagtgctctcagaatccccctttaaaaaactcagggcctcagctgggcgcggtggctcatgcctgtaatcccagcactttgggaggctgaggtgggtggatcacctgaggtcaggagttcgagaccagcctgaccaacatggtgaaaccccatctctactaaaaataccaaaattagccaggcatggtggcatgtgcctgtaattacagctacttgggaggctgaggcaggagaattgcttgaacctgggaggtggaggttgcagtgagccaagatcatgccactgcactccagcctgggcaacagagcaagactctgtctcaaaaataaaataaaaaaaacctcagggcctccaaacattttcttggtattcagggtcttacccagactattttgcatctacctgtttatgttcgtcttccaattacatacttatgctccagctatatagaactattggttgttttccaagggtatcatgctcttttatgtctctatgcccacagataagtggtgcctctggctggagttcttcctctccctttctctcccccgctccttttttttttttttttttttttttgagatagagtttcactcttattgcccagactgtagtgcaatgtctcagtctcagctcactgcaaccgccacctcccaggttcaagtgattttcctgcctcagcctcccaagtagctggaattacacacaggcccttgccactatgcctggttaatttttttatttttagtagagacggggtttcaccatgttggccaggctggtctcgaactcctgacctcaggtgatccatcttccttggcctcccaaagtgttgggattacaggcgtgagccaccatgcccggccccttcttaatttttatgtctggtgaaattgcactcatcctttaaaatcccaactcaattgctgcctttcccataaagctgagttcttagactcagttgcttctcttcaacattttcttgccagtgtgtgtgtatgtgtgtgtatgtacatgcacatgcatgcatgtgtgtttcttctgtcataagtcttaaagccagaggtcatgttatagtcaccctgtatcttcatgccttatagggagcctagaacattgcagatgctcagcaaaagtttatggaatggccaggcgtggtggcttatgcctgtaatcccagcactttgggaggccgaggtgggtgratcacctaagactgggagttcaagaccagcctgaccaacatggagaaaccccgtctctatgaaaaatacaaaattagccaggcgtggcgcatgcctgtaatcccagctactctggaggctgaggcaggagaatcgcttgaacctgggaggcggaggttgctgtgagccgagattgcaccattgcactccagccggggcaacaagagtgaaactctgtctgaaaaaaaaaaaaagaaaatgtatggagtgaatttttattctcataataatttttatagascttgtrtggttgttcttaacctctatccagtgtttgcctctacttggaacatgttgactatttcatcaacagggctattaagattgtgaaccctaaagcattgagaagcagctcctgtgtatgatagaggaggcatagtttactcttgtaactgtgctctgctccaagagcactgagaccctttggcatccagttcttttttattttcccttgagatttctgttgaggttttctttctttctttaagtcgtgtattatggctttctaagctatagtgagattgaaattgttaaaagttatttgattctttgatatcatctgtttctctgaaaggtaacgtacagaatatctttctttagaaatgactgtagatgatggaaaaaattttatttaatctcctttgctttaactgtgctcagctaaattctatcaaagcgctaacttaactgttgtaatggaactaaagtatgttcaaacacagccctgacgggacttttcttgagttattttcagtttctgtggtatctaagtcttcatatctaaattgttttttccttgtaggctgtccggagtacwcatggcttagaagttccattaagccataagggaaaactgatggtgacagaggaatatattgacttcctgttaaatgtggcaaatcaaaaaatggaggaaaacaagaaaagaattgagaggtatattaattgggtatttccatgttattcttatatgcctagatcatccttgaaaacattaatacttactatcttcagtttataatgccaactgcttatctatttgtagataatttaaaaatacttttattatcattaataataaaaagatgatcaaagtaatagatgagagtaggtctggctgccatgggcactaaatggagcatacgggagaggctctctgggggatggtaggcacgtgaccaccagaagctggcataaaggggagaaacataattattctggaaggacagcccagcagccacaggaactgtaactgatcaatttgaaggcagccagggaagagatgcacactgcccctagatgggacctatcagagattacctagtctttcctgttgaggggaacagcctggttgactttttttgtctgataaatatttcacttctctggcttaggctagtttaataccaaactcttgtcatggattagatctagaattgccataactttctaaataggaaggtatggctttcatttcacatctccatacttcttttgttcttcatcgttacctcctggcaaaggaaacttctatattattttctttaacaactttttcccaagaataaagtttatatataaagtagtaaatattatgctgtctttcatatatgaaagtaatgccactgacctaccatcagctagatgcacagttttgagttatccaaggagtaatagccaatttgatgtcgtttataattttcttttttcttctctccactcttttggctacttccattcagtcaatcgctgtctgaatatctcttcagtcattctgtctccatccatactgcttctttcctcattcatgaccatcacaatagcctcattcaggatgcttctggtatgcctctctgctaagccattctttatcaaatcatgtttgtaaagtgsaaaggattcctgttgcttaacttgcctgcttaagattctttaatacttagaactttttytgaagcattgaaggccaacargtgctagtggtggcagtgtaaaagggtgaagtgaggtagaagtatgccaccaaggcagaactgggttcaaatcgtggttctgagttactcagtctggttccaccaaattgctcaactttccagacttcaattttcttatctctaacttctgggaaatacctatcttaaagaataattattatattcattagatagtgtatttataatgactgccctgaccctgttatgttttggactctcaggacaggatagccattctccttcattgattcatggagaataaacctataatcataaaaatatcaccattcaggctttctcaactagggttcctcatttgaaccacacaattcacaaagttatttgagtgactattttctgaattctcccaaggattttatgtaacatgtactattttagatacattggagaaaagtcaattcattacttacaatggatgtcttagggtactagagcttaattttccagccacaccctggttgagaaaaactgaccacaaaaacctggccacaaaatactttgagcaggtattctaactaaagtaatacttttaaataagcaaaacccattccaccagactacagactactatatgtaagtatttactggtaccattccataagtttaccacttattaaattgtaatccagtgagactgtttgctaaaacataggaggtagcaaatcagttttctctgtttcctttcttgaattttaacaagcttataaatagagcccaagatcaactaactgtacacctggtgaagttaattgagccacgttcaccaactataaaatcaaattatgcttaaatccattgactcaaaaatatgttttgagattataatgtgcatgctgccattaagagccacgcttatcatataaaatcagggaaaaattaaagaagggtaaaaatgtcttaagatactgattagaagattacatgtgaatttagaaagtgagaacaaattaaggagctcctttgggaacagctgtatgttcaaccaaatgcagtgaaagagttactcttctgatgttgaaaagagaaaaaaatccttgaggtgatgagttatgcaatcagacattcattaagtactaagattggtttgccataggaccaaagtttcacaattcagagaatttcaaaaacaaaaaatcctgaaaaacatttcagcaataagaaatattctataaatgtgaaaattaaagaggtagaatatttttaataaaaaaaaaggccttgttcatgagaaacaattcctaagcccacttcttatgggaagagacttatccattgggttcctgttgtttctggagctgggcaagacaagaccttcaagcagcagactgctttataaacagctaatttggagactggaagagacagggactgacaccagatgtaggaagacaattcatacataacgatctagagaaatttggatagctattgactgactacaagaggaaggctatctttgaatctattaataagcagtcagcacatgggtcagatgaaaccatcatctggctatgagtagcataaaattagccatgtgcttttcaccaactgtgtaatgagaaaatattacataaaatgtacaataaaggggcagaatatattgtcatctaatattgttgataaagcaaatctggaagaaaagtaattgaatccactttcaatagttttttttttaactctattttctgataaaatgtacgcaataggaaatttaccattttaaccagtggcattaagtgcattcacattgttatgcaactgtcgccactgtccatctccagaacgttttcatcatcacaaactaaacttctctacccattaaacactaactctcgattcctcgtactccattcccctggtaatcactattctattttctctatgaattccactattataggtaattcatctaagtgggatcatacaatatgcatcctccagtatctggcctattttacttcrttaatgtaggattcatccatgctataacatgtatcagaatttcagtttctttaagagtgaataatattccattgtatttatagactgaattttgtttattcattgatgtgtcaatggacatttaaggtgtctttcccttttagctattataaatgctgctctgaacatcattgtacaagtatctgagtcactgctttcagttctgttggatatatactcagaagtggtatagtgtaatcaaagaaagcatattggaagaagtcactgagcagggcctaaaatgcaggcagggtttttatatgaagagctctgtgggagggggaaatagcatgatagataaaaaagaagagcatgaacaaaggaaaaagagatagtgatatggtttggctttgtcctcacccaaatctcatcttgaatttccatgtgttgtgagagggagctggagggaggtaattgaattatgggggcaggtctttcctgtgctgttcttgtgatggtgcataagtctcacaagatctgacggttttaaaaacgggagtcgccctgcacaagttctcttcacttgcctgctgccatgtgagacatgcctttcaccttccaccatgattgtgaggccttcccagccacatggaactgtaagttcattaaatctctttcttttgtaaattgcccggtctcgggtatgtctttatcagcagtgtgaaaatggactaatacagtaaattggtaccactatagtggggcactgcggaaaagatacccaaaaatgtggaagcgactttggaactgggtaacaggtagaggttggaacagtttggaggattcagaagaagacaggaaaatgtgggaaagtttggaacttcctagagacttgtctaatggctttgaccaaaatgctgataatgatatggacaaggaaatccaggctgatgtagtctcagatggagatgaggaacttgttgggaactggagcaaaggtgactcttgttatgttttagcaaagagactggcagcattttacccctgccctcgagacttgtggaactttgatgttgagagagatgatttagggtatccggcagaatttctaagcagcaaagcattcaagaggtgacttgggtgctgttaaacacattcagttttataagggaagcagagcataaaagttttgaaaacttgcagcmtgacaatgtgatagaaaagaaaattccattttctgaggagaaattcaagtcagccctagaaatttgcataagtaatgaggagctgaatgttaatccccaaggcaatggggaaaatgtctctagggcatgtcagcggtcttcacagcagtccctcccatcacaggcccagaggcctaggaggaaaaagtggttttgtgggctgggcccaaggtccctgtgctgtgtgcagcctaggaacttggtgccctgtgtcccagccactcaagccatggctgaaagggaccaatgtagagcttggggctgtggcttcagagggtgcaagccccaaaccttggcagcttccatgtggtgttgagcctacgagtggacaaaagtcaagaattggcatctggggacctccatctagatttcagaagatatatggcaacacctggatgcccagatggaagtttagtgcagaggcggggccctcatggagaacctctgctagggcagtgccaaagggaagtgtggggtcagagcccccacacagagtccctactcgggcaatgcctagtggagctgtgagaagcgggctaccatcctccagaccccagaatgatagatccaccgacagcttgtactgtgtacctggaaaagccacagacactcagtgccagcttgtgaaggtagccagaagggaagctgtatcctgcaaagccacagaggcagagctgcccaagactatgggaacccacctcttgcatcagcatgatctggatgtgagacatggagtcaaaggagatcattttggagctttaatgtttgactgccctgctggattttagacttccatggggcctgtagcccttttattttggccaatttatcctatttgaaatggctatatttacccaatgcccacaccaccattgtatctaggaaataactaacttgcttttgattttacaggctgataggcagaagggacttgccttgtctcagatgagactttggactatggacttttgagttcatgctgaaatgagttaagactttgggggactgttggaaagggatgattggttttgaaatgtgaggacatgagatttgggaggggccagtggggcaacctggtgggaggtaattgaatcctggggacaaggtctttcctgtggtgttctcatgattgtaagtctcatgagatctgatggttttaaaaacgggagtcttcctgcacaagctcacttttcttgtctgctgccatgtgagaccttccaccatgaccatgaggcctccccagccacatggaaccataagtccattaaatctctttcttttgtaaattgcccagtctcaggtatgtctttatcagcagcacgaaaatggactaatacagatggcaatatgtaagccataaatagggatcagtgaatggttcggtttacctagaagatgagagagtaagaatttctgttgtatcactttgctgcttttcttcctgcttgtgatgtttcttcttagtttcattgtaggtttctcttcttcctcttcattaaatactgttctccaagcttctgtccttggcccatggcttcaactagttctgctacttttccatgtactggcaggtcttctaaatctttctagagtcttgggccaacatatccaataaccatttgaacatatctaattaaaatctctcaccagcttttccttaatatgtttcttaccttattctaaatcccccagccrttttcwtggttccaattcttatcrtcatttaccagccattttcatggttctgattcttatcrtcatttaccagccattttcatggttctgattcttatcgtcatttaccagccattttcatggttctgattcttatcgtcatttaccagccattttcatggttctgattcttatcrtcatttaccagccattttcatggttctgattcttatcgtcatttaccagccattttcatggttctgattcttatcgtcatttaccagccattttcatggttctgattcttatcgtcatttaccagccattttcatggttctgattcttatcgtcatttaccagccattttcatggttctgattcttatcatcatttaccagtgcaaaacaggtatttctattacattgaattacaattacttaattgcacatcttttttttccactgcaacatggtcacgttgaagataggactccccccaccagcccccaaccttacacacatacacaaacacacttgagatatcttatcctacaatgtaacatgtatctggctcacagtagaagcccaagaaatgtttattgaattaatgataaaagataaaggagcttgaaagttaacacattatattgagttctccaaaggcaaaaacagtttcttgttcattatattctgagtgtctggaatgagaatagtggttaataaatgttcacaaatttagttgactagactttttcataaatagtgctactttttttaaggcttcaaagcattaggatgcttattctggaagacctgtcagatggtttagagatggggtgagtacaagtaggctctttctatagcctaaggaagaagtaataggtccctgagtaacaagatgaatgagaatgagactgcagaatatccatcagacatggcagcaggttggaaataggggtaacacagagaaggaggactaaagaataagagctgtcttagattcctcatagttgctagtctttatcatttttctttctttcttttcttttctttttttttttttttggtagagatgaggtctttctatgttgcccaggttggtttcaaactcctggcctggccagaagtgattgtcacaccttagcctcccaaagttttgggattataagcatgagccactgcacatggtcaagtcttaccatttctaaaaatgggtctaaaacagctaaataaataacacacatttccctgtatagttgacccttgaacaacatggagttagggttaccacccccctatgtagttgaaaatccacatggcttttgttgttgttgtttttgagacaggatctcactgtcacccaggctggagtacagtggcatgatcttggctcactgcaaccttcgccttccaggctcaagtgatcctccacctcagcttcccgagtagctgttactacaggcatgtaccaccaagcccagataattttttgtatttttttgtagagatggggttttgccatgttgcctaggctggtctcaaactcctggactcaagtgattgcccgccttggcctcccaaagtgttgggattacatgcataagccaccgcacctgkctgacatatgacttgactcccaagaaacttaggtactgatatcctacctttgactggaagcattattcataacataagcagttgattagcacatgtattgtatgttatatatattgtgtactgtattcttacaataaagtaagctagagaaaaatgttattaagaaaatcataaggaagagaaaatatatttattattcattaagtggaaatggatcatcacaaaagcctttgtcttcatcgtcttcaccttgagtaggctgaggaagaggagtggttggtcctgctatctcaggggtggcagaggcagaagaggtagagaaggtagaaggagaagcaggaatatttggtgtagcttttattcaaaaaaaatctgcatgtaagtggacctgtgtagttcaaaaccatattgttcaagggtcaactgtatacttaagaccaaataagtaaataatataaagcgaaaacatatattttattttctagtagtgtttcctgggacatcccccatgcccccatcttttttcctcctaattcctctcttagcacattgtcagcttccattcatccttgcagttcagcccaggcattggatcttataacggagagcattttgtgatttcagttrgagcactgtgtcccatctttttcatggtgtgttaaatgtggctttacagttctgtagctcctgttaaaccatgagctccttgagggcacagaccacagaccacttctctgggcttctagtactgggcacttggcctgtcacatacatgttgttttttaaagaaaatgctagttaaaatctaaatacatattagaatagccttctttgatatttgtgaatgatggaagcctaaaggaaataaaattgtgcctcagtttcctcaattctgtgtttttgtttgagaagttagagaaattccagctttctgttgaaagtggttttctaactgacgttgaaaaacaagaattcattttctcaggcttggcctgaaaacttatgaagagaactaagtacaagttgtcctatgctatgataatcttgactgcagaggcagaaaaactgaaggctatttgcttttctttcaaggagagaaaaaatacagttgcctgaacatacttttttttttttttccttaaatctcagagctcattttgttgcctgtgagagttcagaaaattgcacttttgaaaatcaggcttaagtgttactgtataaggggagaacataacttttgacttaytgagtactgtttctcaaaggacttttaaagttctcttagaaaagggaaaggaaaactagtatttgaagtttttattcaggaaaggatctttgttccattttaccagttgttttggtaccctaaggacatagctttgaattcttaggttctttaatggttgattaaagtaaggcatacattcctttttaattacttttttttaatgtgatggatgaggcatttttcacaagctgttaattctcggtgatcataaaggagcaatttaatcttatctttcattttctaggaagaaagtataatccagaaaaaaacactcagttacctaagcctaaagtgcagggttgataaagaatggtagaagatgaggttgtataacagggatggcgtcttatgatcaggatgagccacaccatcttgtggcatgctcagatttatgttttagataacgttaatgtaagtcattctgaacaggctgtgtggaacatgagaaggataccagtcattgacatcacctaagatggtgacaagacctagaaagaaagatcaagtcaagcatagaagttttcatcaatgtaaggaaccaaacattattggtagatgacatgaggggcagatggaggaatttgggaaaatgttgatgagccggttttattctgacctcatctctcagctctgtggtagcaggatatggaaaacataagcagtctccgcttgggaggaatgatggaagatggtgtctacaggggagccaggtttcagtaacggaaggatgtaaagggtgcattaagtgaaaggatgttaccatggaacaaggcccaaaaagttatgtatgtcacgcatctcagtctttttaaatttaactctgtgtctgtttttgagattaattcattcattgataaaaatatttattgagcatctgttgtttgccaagcacagcactagatatcaaggtgtacagtgatgagtgcataagttcttgaaaatggacaggatgtgtactcatcatgttgtatatgtattagagttaggtgacatatttaggaatatgtggatatttggagttttkgagttttataggcttcgtaagtagaacttagcctgtttattgaatcaaacaaagatgaaaattggtccaaatagagatctattctgtagatatcaaaaatttcttgccatagtctcccattataataggacataaaagtaagatgagatctctgcagtggcaggggggtttcctaactttcagatcattctgatttgagacctaggataacacatttatagttacatttttattctggggttattcattcatttattcaatatagtcttactgagtatgccagcactctactacatgctcagaatataacaggagacaggtagataggatccttgctctcatgaagtctatattccataaaagtagtcatttttgataactaactctctgggtacttacatatatcatctgtaatcctgtgacaaccctgatagctacaggataataatatccagctttataaatgtgaaaaatcaagactgtgggaaattaattggaattagctgacatcacctttcctaaaagaatgttggtgtcaaatgcatgcaacacaccatgctatgctgcctgctgcaggctactgtgtcaagcagagttttgtgttaggtgttaacatgagggtagaaaagaaatgaggcctggttttcagagagcctacagtttattgtatcacaaaactaacactaaaactccaatagaaaaatgaataaagggaaacaataatttacactaaaaaattcaaatagctaataaatgagaaacattgtattttacttacaaagaaatgaaagttaaaataatgcgatatcattttcacccatccaggtagaatgtgttttttgatgggaatattcagtgtataggtgtagtgatctctctcaagtgcagctattagaagcgtatttctttgaatatctattgtgaaaacaagcagtatttatcaagagccttgtaatgtttatgccttttaacgatgtaatgatatttctaggtgtctatataaagaaatggctaaaaactcacatcacatcattttcaaaaatgcttaccacatttttgtttgtatcagggaaaatttgaatgtaaataaaggccaatctagatgacataatgttgtactgccactctcaataaataataactttgaaaaaacaatgtaaaactttatatgtaatattctaattgtgacaaatagrtatatggattaattaataaatacattaattcagactacattaataaactgaaaagaaaaatattgagaggagttatttctagttatgtagaggtgatctgtatttgtaacctcacacattatacaaattacctaaaatgagccattacatttatgtaataataattgcattcttttttaccctcttctttgacccctacatttgggttggaaagtgaggtaggacagaggttgtcaagaggtgattccaatccagttttcagngctgttcttaaagaactgaaatgcatttatttccctaataaaacatattatttatttgatttatatttataaagctaatatgggacatagtcaaatttacataacttataagctcttggtgtatttcagtcatttcgtttcagtacacacagatataatagtagtacttatttcttcacaggttttacaactgcctacagcatgctttggaaagggaaacgatgactaacttacatcccaagatcaaagagaaaaataactcatcatatattcataagaaaaaaagaaacccagaaaaaacacgtgcccagtgtattactaaagaaagtgatgaagaacttgaaaatgatgatgatgatgatctaggaatcaatgttaccatcttccctgaagattactaagctttggttctgatgtgtcttggccgtaatgtttctagtaggttttataaagctgctcttcataagagtattttagtttgttgagtgtatcagccattcataagccagtaatgacaagtgcagagcttcaaactataactttgttgcccagaggatgtgcagttgtcatctaagctctcagcagtacccggcttatcctacgacttcacctgaaatgctatagttatccctacttttttaccagtttctcccagaagcacctgcttaataaatcaaagatgtttgaatggtgtcttattctgaaataacctgacctaagacaggtatttagattattttggatacattttgaaaagggatagcataaatattttaagtaaaaagacctttattttaaataatagtggatattttaatgctggaaattagcattatagttgatatgccagaaattatatctttggttgtgatttaaacttatgctataaactaaattaatgatgtaaatacatagttttaaacattcttttagggacatgtaacttttaagtatcacttcaataatacgtattattataggaacaaagatttgggaataattgattacaggtgaggaagtactggaattccagttcaaggagataccatttcatttaggactaaaaggacaagatacaagttcacatgatgggaaaaatcagaaaacctctcgcagacaaagggtatataatggatatgaggcatcaaaaagcatggtatagtcagtgatggggaatagtccagaaaggctgaaacacagcatgtgatgcgagtcaaggtagttgatgcccaactgtgaagggccgttctaatctagcatggaggtagacagtgtttccttaatatggctgcatatcagaattacctaggtcaggacgaggcatggagatgctactttaataggccctgccgcagatcttccaaaccagaatcttaatcctggagtctaggaatctttatttttcacacaactcatccaagtggttctgataaaatcagtccagcacttttagaacccactgataacagacttattcctggagacagcatttgaggaggaattgaagatttttctaatgaaaagaaaaagggtcacatgaacagatgttgcagtgtacctgtgccagggatttcatgtgtacactttataggagaataagcaagagcttaggtaagttatagtccttaccattgggtctaaggcagtttccaggaaagcatggcaactcgttcagctatgtaagttgaactctgtaccacttgggagggaacattcccctagatgacaatgtcagtggcactcgaagttgtgcagtgcacattcttatctaccaacatatacagcagtccttctgggaaggaaatttgggcaggaaagggaactcacagtgtcggaatgcctggagcatttcttctagtctggtggacagaatatgaaagtatctgcctggcagtgcagtaaatgaaaagagaagataaatgaataaaaaaaaaagttataaataacagtaggaaagagagagtgcaggtggaacgagcctatcctgtggtgaaatgacaacacattctgcagttttaaaatctaagaggctcattgacttttcttcattcatttaaattgatctccaagaaaactatgtattttaaagattccataaactgaatatatgaatgagaattaagaagagaggggctgcttcctaatctgtttatataaggtatagtatagtataatctgtttatataaggttagtagagaggagacaccaggtgctggccataaacctaagaagacattgaatcccattcactccttaacattccttaatatacattcatgagctacataacattttaatcatcaatgatggaccatataccatatacgatatggtggccccataagattataatggacctgaaaaattcctattgctagtgatgtggtcattgtaaagctgtagcacaacacattacccacgtttgtggtgacagtcatataaaagtatggtacatataattatgtacagtgcatacataatacttgataatatgttactggtttgtgtctttgctatgctttttatcattattttagggtatactacttaaaatgttaactgtaaaacagcttctgacaggtccttcaggaagtactccagaagaaggcattgttatcatagaaggtgacagcttcatgtgtgttattgcccctgaagaccttccagtggtacaagatgtggaggaggaagacagtgatactgaggattctgaccctgtgtaggcttaggctaatgtgtgtgtttatatcttagtttttcacaaaaaggtttttccaatgttaaaaaaaatatataaaaaagcttatagaataaggatataaagaaatattttgtacagctgtacaataagctaagcattattaccaaagagtcaaaaagttttaagaaattaaagtttataaaccaaatgttcattgtgagccaaggttaatttattgaagaaataaaacatttttaatgaaattttgtgtagtcttagtgtccagtgtttataaagtttatacagtaatacgtttatacagaacatcctaggccttcacattcactcaccactcagtgactcacccagagcaacttccagtactgcaagctccattcatggtatgtgccctgcacagatgtgctatttttcacctgttatactatatcttaattgtaccttttctatgtttagatatgtttaaatacataaatacttatcattgtgttacaattgcctacagtagtcagcacactaacatgctgtacgggtttgtaccctagaagcaataggctccaccatgtaggcccagtagtgatgtttgcgtgactaaatcaccttacaacccatttctcagaacatgtttctattgttaaacaacacacaactattttatttatgtgttttatttatgcctgatcaccaatatcaataactgaaacacagcagtttagtaataatttaatacacaccataacctgcctattgagaatggcattatatttgttttcattgtagtggctccatccaaaataaaatgatttttttccttccttcaggatgaaggcaagcatttattcctacggtctggattcctcatatcacctacaagttaactgcttttgtgttctaaaagagagaggaaaaatgaagtcaaccttattgaaaaacaaggagggaaactaaggaacatgcttttgcttttgaggttctaggccagaagtcataagctgtaacttgtccaagttatggccaagcagatatgttttgtttggcccacatggagtatattttttctaattgaatcaacattttaaaatatgatgatttaatatttaaaactataaagcgcatctctagtttgttttgtgtgtgtttttttaattggaagatctggctggagccgtctcacattcccacaggacaacacttagccgttcaagtactagctcctccttttggataagacttgttttcctattcaccccagacccagcaccccctactggttccctgacacaactgcttcaatcatttacacattgtttggtccctgtgggcaccagcattggcaaactttggttagatctttggggagaattaaagtctattattatgttagtatattatataataaataagagatgggagcaggatcagctatataattttcaaaggacagtgcaaaatgaaaatgtgggacccttaaaaaaggtttaagaattacaagatggcaacagcggagcactaaatcacgtacaggtacatctaagcacggggccctatgcaagctgcacaggttgcacatacgtgaggcttggtgctttaagggaaatgggtgccttcccactcaactgggtgtttaaccctcctccccacattgagaaagaggcagagtgctgcagattctgtgatgtgccaggacttgactcctgctcacatgtggcgcccttgggttccaggacaatgggtagctgtttggaagcctgcaagggtggatgttttggaagctagggcaaagatctcagtggctacccttagatggagtaaaccgtagtccttttcagagccacttgatttcaaatgtgagcaaaggcagtgatgagcaccacgttttgaaaacaagggctttctccattttgagatgagttatatgatttgctgggttaagtgttgaagagccatgaaaaatgatcaccatctttattcttatagatggctccttgagcaggctttaatttgactggagttgcggggagtaaatattacactcccatataaggtgtataatagtgactattttttagttatgatttttggcttttaaaaatgggctttgaccttcaagcctcttctttccatactctactgggcttctgtcaacattcacgcttctctaatgcaataggattttaatattcacaaatgctaatgtttttaaacttaacagtcctttaatgtcctgggtttttatgcattctattcttgccaagcaagaatttatgagccctttttggttttgcctttaatgtggttgaatttaaactataactttaactcattgcaaattttatttatttattcatctattttaataacattttttggaacagttttaggtttacagaaaaattgagagaaaaagttcagatagttcccatgtacccacttcatctgcccacacatgatatcctttatcttatatatcctacatcttacattagtgtgggactttttgttacaattgataagccaagattgatgtttcttgactaaaatccatatttcatgcctctcttcatctctcttcaattctgttctctcctgtaactattagtctattagtcctatattatacctacttatgggcctattctccatattgtctaatcttttcatcccccttcaccagcttctcttcatctctatgtgtgtcattctgtgtcattcactcgggttattgtttagttaactcataccctcttcaactgtgtctaatctactgcctagatagtccattgagttttacatttcaaagattatatttaattatttctagttctttttggttcattttcaaatcagaggcagattatttaaaggttctaataattatttctttctatataccttttcccagatatttcaataaattatatttacacaaacctttcatacacttgtatattatagaaatgatctatgttctttagctattccaaggataattgaaaagaatgtcctcaccaccaccaaatctaaaccatgcaagaagaaagtgaactatttctcaataaccagattgtttacatgccatttttattatttattcatttacatgacaaatattttttgagcacccactatatgtcagtcacatgcaacaggacaaggactctgccttcatagagctttccttctagtaacattattaaagattttgtttgtattggcacttgcctaggatctttagtgctctttaaattttactcatcaatcagggctcagctcaaatgttaactcttttgagaagctttcctaaaagctcatttcataattaacttcttacattcctgtttttccatagcactttcccagtactatatatacatagcattttgtttatacttacataaccacacaaaccaagaaatctcttggtagctattaattgcatacatatatatctatccatcaccaccatcatattaaactttgactaactgagggacaaagctgtttttccaatatttttatatccccagcatcttggacgttgttgtttttttaacaactactttctattctggtttataaatgcattgtagctgggagagttcatgagtattatgtaattcattattttataagcaaatgacaaaatccctaaccaaattatattactattcaattcttgaaggaatcttgaaattgataaagttaaatgactgaagttaaaaaaaagatgcttagaagccactaaacacatgcataatactattctttatatctcacaaaatatccaaatttccagatgttagtattccaagatataccttgtgactaaacatgataggtcttgtctttcttttttcacaccaagccttttgaaagcctttttattttgaaataacttcagatctacaaataagttataatagcactaagaattcctgaatatactttacccagagtgaccattctctctctctctctcatatacagacatacagtacatatgaataatctcatataaatatacaaacttttgagagtaagtta

SEQ ID NO: 95098 - DNA, 20886 bp, Homo sapiens
  misc_feature (1)...(20886): n = A,T,C or G
tatccaggacttgaactcagctctgcaccaagcagacctaatagacatctacagaactctccaccccaaatcaacagaatatacattcttcgctggtaccacatcacacttattccaaaactgaccacatagttggaagtaaagcactcgtcagcaaatgtgaatgaacagaaatcacaacaaactgcctctcagaccacagtgcaatcaaattagaactcaggattaagaaactcattcaaaaccacacaactacgtggaaactgaacatcctgctcctgaatgactactaggtaaataacgaaatgaaggcagaaataaagatgttctttgaaaccaatgagaacaaagacacaatgtaccaaattctctgggaaacatttaaagcagtgtgtagagggaaatttatagcactaaatgcccacaggaggaagcaggaaagatctaaaatcgacaccctaatgtcacaattaaaagaactagagaagcaagatcaaacacagtcaaaagctagcataaggcaagaaataactaagatcacagcagaactgaaggagatagagacccaaaacaccctccaaaaaaaatcgatgaatccaggagctgtttttttgaaaacatcaacaaaattgatagaccactagcaagactaataaagaagaaaagagagaagaatcaaatagatgcaattaaaaaagatgaagtggatatcaccaccgatcccacaaaaatacaaactaccatcagagaatactataaacacctctacgcaaataaactagaaaatctagaagaaatggataaattcctggacatatacagccttccaagactaaaccaggaagaagttgaatatctgaatagaccaataacaggctctgaaattaaggcaataattaacagcctaccaaccaaaaaaagtccaggaccagttggattcacagccgaattctaccagaggtacaaagaggagctggtgccattccttctgaaactattccaaacaatagaaaaagaaggaatcctcaactgattttatgagggcagcatcatcctgataccaaagcctggcagacacacaacaaaaagagaattttagaccaatttccttgatgaacatggatgaaaaatcctcaataaaatactggcaaaccgaatccagcaacacatcaaaaaggttatccaccacgatctaataggctttatccctgggatgcaagtcttgaatcaataaatgtaatccatcacataaacagaaccaaggacataaactcatgattatctcaatagatgcagaaaaggccttcggcaaaattcaacagcccttcatgctaaaaactctcaataaactaggtattgatggaatgtatctcaaaataataagagctatctatgacaaacccacagccaatatcatactgaatgggcaaaaactggaagcatcccctttgagaactggcacaagacagggatgccatcactcaccactcctatttaacatagtgttggaagttctggccagggcaatcaggcaggagaaggacataaagggtattcaattaggaaaagaggaagtcaaattgtccctgtttgcagatgacatgattgtatatttagaaaaccccatcgtctcagcccaaaatctccttaagctgataagcaacttcagcaaagtctcaggatacaaaatcaatgtgcaaaaatcacaagcattcctaaacaccaataacagacaaacagagagccaacttatgagtgaactcccattcacaattgcttcaaagagaataaaatacctagaatccaacttacaagggatgtgaaggacctcttcaaggagaaccacaaaccactgctcaatgaaataaaagaggatacaaacaaatggaagaacattccatgctcatgggtaggaagaatcaatatcatgaaaatggccatactgcccaaggtaatttatagattcaatgccatccccatcargctactaatgactttcttcacagaactggaaaaaactactttaaagttcatatggaaccaaaaaagagcccacattgccaagtcaatcctgagccaaaagaacaaagctgcaggcatcatgctacctgacttcaaactatactacaaggctacagtaaccaaaacagcatggtactggtaccaaaacagaaatatagaccaatggaacagaacagagccctcagaaataatgccacatatctacaactatctgatctttgacaaacctgacaaaaacaagcaatggggaaaggattccctatttaataaatggtgctaggaaaactggctagatatatgtagaaagctgaaagtggatcccttccttacaccttatacaaaaatgaattcaagatggattaaagacttaaatgttagacctaaaaccataaaaaccctagaagaaaacctaggcaatactattcaggacataggcatgggcaaggacttcatgtctaaaacaccaaaagcaatggcagcaaaagccaaaattgacaaatgggatctaattaaactcaagagcttctgcacagcaaaagaaactaccatcacagtgaacaggcaacctacagaatgggacaaaatttttgcaacctactcgacaaaatgtttgcaacctactcatctgacaaagggctaatatccagaatctacaatgaactcaaacaaatttacaagaaaaaaacaaccccatcaaaaagtgggcaaaggatatgaacagacacttctcaaaagaagacatttatgcagccaaaaaacacatgaaaaaatgctcatcatcactggccatcagagaaatgcaaatcaaaaccataacgagataccatctcacaccagttagaatggcaatcattaaaaagtcaggaaacaacaggtgctggagaggatgtggagaaataggaacacttttactgttggtgggactgtaaactagttcaaccattgtggaagtcagtgtggcaattcctcagggatctagaactagaaataccatttgacccaggcatcctattactaggtatatacacaaaggattataaatcatgatggtataaagacacatgcacacgtatgtttattgcggcactattcacaatagcaaagacttggaaccaacccaaatgtccaacaatgatagactggattaagaaaatgtggcacatatacaccatggaatactatgcagccataagaaaggatgagttcatgtcctttgtagggacatggatgaagctggaaaccatcattctgagcaaactatcgcaaggacaaaaaaccaaacaccccatgttctcactcacaggtgggaattgaacaatgagaacacagggacacacgaaggggaacatcacacaccccacaactgtggggtcgggggaagggggatggatagcattaggtgatatacctaatgctaaatgacgagttaatgggtgcagcacaccaacatggcacatgtatacatatgtaacaaacctgcacgttgtgcacatgtaccgtaaaacttaaataataataaaaaaaatcaaaataaaatagaagttgaagaaaaggaagaaaaacaaagtcaggaaacaacagaagctggataagatgtggagaaataggaacacttttacattgttggtgggagtgtaaagtagttcaaccactgtggaagacagtgttgtgattcctcaaggatctagaactagaaatagcatttgacccagtgatcccattayggggtatatacccaaagattataaacacacatgcacacgtatgtttattgggcactattcacaatagcaaagacttggatccaactcaaatgtcatcaacgatagagtggattaagaaaatgtggcacatatacaccatggaatactatgcaaccataaaaaaggatgagttcatgtcctttgtggggtcatggatgaagctggaaaccattattctgagcaaagtatcacaaggatagaaaaccaaacaccgcatattctcactcataggtgggaattgaagaatgagaatacctggacacagggcagggaacatcacacacaggggcctgtcatggtgttgggggaggggggaaggatagcattaggagaaatacctaatttaaatgatgagttaatgggtgcagcaatccaacctggcacatgtatatccatgtaacaaacctgcacgttgtacacatgtaccctagaacttacagtataatttttttaaaaaaagtaacttccaatatttttactattagcactctccgaagaagtgtttgtggtggcggtggtggtggtggggagggtggcctgtgtgtgtggcgaggagagggggcgggtacagggctggaccttgagatagataaggcaaacaggaaggaaatgtgaacatttcattaatattcatttaaaaaatattcattgaacacttactacgtgtaagcaggcactctactaattaacagccatttcagattttcagagtgcaaagggcctcaagaacaaatgatttatttttttgagacatggtctcgttctgtctcacaccctgcagtgcagtggcattatcaccgctcactgtagcctccaccccctgccccacagctcaagtaattctctcacctcagcttccccagtagctgaaaccacaggcttgggcaaccacgtctggctcatatttttattatttgtagagacgggggtcttgcaacattgcccaggctggtctggatctcctggaaccccctttgcaaaattataactgaggaaattatggcagtgaaagaaatcagacctaacggattccatcttgcttctaacttttgtttttgagactagtctcgctctgtcgcccagggtggagtgcagtggcgtgatctctgctcactgcaagctccgcctcccgggtttaagccattctcctgcctcaacctcaggagtagatgggactacaggcgcccacccccacgcccggctaattttttgtatttgtagtagagacggggttttagccaggatggtctcgatcccctgacctcgtgatccgcccgccttggcctcccaaagtgctgggattacaggcgtgagccaccggccgcttctaacttttaagctgtccttcttcattcctgagcctaggctgaaccaatttagggaggaattcagtttatggtttgactctgaaacaaaattgataatatccctttcccaaaaagaccgcttttttgcctggggaccagtctgcctttgcagaaccaacagattagctacaagattagaaattacagtttagaggtcatgcagcctctggctccaagtttctgaacctccccaaattgctcctggggataacatcactattgtaaaacctaagataagttcttgagatattttgcagaccctgctctccatggatcagttgaaaccacccagattggtaatttggctcaaccagttctgccatcctacccaggaacagaaaacagcaagaaaaactcacgtctacccactatgagtccatctccaacctgacccatcagcactccctacttcccaagcccctaatcgccgaattatctttaaaaactctgaatactgcttggggagactccattgcaagtcccctgtcttgataaatgggctatcggtcagcagcaggcaaagtgaaccacaatattgggtggttacactcctaggatcaagcaatcctgctgtccggcttcccaaagtgctgggattacaggcgtaagccaccgcgtccagctagaacaaatgatttcttaaaagcaactcagatatttaaatattatttaaaactgtttctagacaaatcggagtgactatgggacaagcacatggtcgcaggactttggacgcaggcagtgaggacacctatgagcgatcagtggggtcctacggcacccgtggaactgctctgccttgcaggcgaaagtgtggtcagctatatcggagcgcgatgggggcctgagaggcgcatctgcgcaggcgcccggctcctaagtctacccaggaactgaccctgctctctcctttccctgttagacatggtaagtgtgagtttagcgctgctgtccggatgggttggtagcagacagggtrgagtagggttaagcacactggtcaccttaggattggtttcctggtgctggagaatggttaggacacaggccttggaaggttttttgagtgtgaaatattactcagcgttttctgcagacctcgcgggcaatgccgcttctaattttatccaggccttcttctgtagggaggrcctgttaagagttgagcarcccgatttctgaacccctctaaaaagctgtggctgattggtggcttttttttttcttggagagggggtgtcaaagatttctttaaaatcgttagtgatgtggtctcgctttaagatttttaatgggatcagargaaaattcggtacttaatcacttccggtaatcttcatgacctgttatagtgactgcagtgtactctcaatgaggaagatatagatacgaaaagaactagagccgcatcacatggggacttctgcaaatacagagactcggattaaaggtggagaagatggagctaaaggaactgcttatttaatacatttgaacaacttttggggtacttagaaggtgctttgaaacctgcatttgattaagcaagaattcgcttgcaagttaagggttagatttttttattttttaaaaatatgctttctgccacatgtaaaccgtaagttgtcctgaaatgataagctttgataktctayggtgtttattttttacttatctttttgaatgaaaagtgaacaacaagaaatgctggtggtaattttttgggtcaatgatgagttggcatgtattctgaatctaaagttgattattactactttagctctagaattactctgagacctgaaaattacctgaatcgtgactaagacgaagcctgaatgatttaagttcttttttgttggatacaatttgttgttgttgttgttgttttggttttgtttttgagtcggtctccggtcgcccaggatggagtgcagtgacacaacctcagttcactgcagccttaatttccctggctcaagcgatcttctacctcagcctccctagttagttacaatttttaaatggaacgttttcctattacaagatgaaatcaagtgaaaattgagatgtatgttgaatctatgctgtggggcagaagaacgytgtagaggtaaacattgatgagattaccactttattttgaaagggcactccacagaaggatgttattatcaagtcagatgcaccggacacwttgttattggagaaacatgcagattatatcgcatcctatggctcaaagaaagatgattatgtatgtataatttttttatgttggaaagtttattttaaagaagtgtgacagtcataagcagtgagacagtatttatgtcttaaaatggcatccaactccatgcagagaactgaggatgtgctgtgcctttgaacttcagttaagtgtgctttggacgtctgaggctgtgggcttattagaatctcagtttttacctatactgagagggcttgccagacaaagtagatgagggtttgaggtacaaaacgggtttctctttttgtagttaggggtaatactttcaaggtcaatgatgtgttggcatgtattatctgaatctattgctgatgtgtaataacactttagctctagaattactctgagaccttgaaaaagttttaccttaaatttttaaatttcgaggaaaactctgggacaatcttagcaaaaagtagtaaacaacttagttaagagtaaatgtttttccctgtagtatccaaactcagttgtcttagtctaccgatttgtgggatatatggtatgtattaattttttacttaagtgttaggttcccataaccttgaaaatactctattagcaatcatggagttaaggccatatggatggggctggactcgtttctgcctttatctgctatctatctttatgccctgaatttgggttagtagcaaactaagatgcaccacctgttaaaaaaacttctttttttccttttgagagctataacctcactttgttgcccagactggaggacagcggtgcgatctgggctcactgcagcctccatctcctgggtttaagtgagccacctgaatagctgggattacaggcacattccaccatgcccarytagtttttgtatttttcgtagagactgagttttgctatgttggccagagtggtctcaaactcctgacctcaagtgatctgcctgccccagctttccaaagtgctgggattacaggcaggagccaccacccagccacaaaacttcttaaaatataatgcattgttgagtgtgggaaaaatttgtttctggaatcctaatactaattttcatgtatcattgattagccactgttttatctgggcttaaacatctttggcatgtttagggcattttgatttttcatgtagttatataatttactaatagataataggttttgtacagagtccacattaaaatagatgtctgataaatatggtataggtactcggaaagaaatactctccctgaacttcactgatgaaaaaggtagatgtttttctgtctctggctcatgggagaaactaaagcactgtttgtattgtcagccatagattaactaatcctgtgcttctcagataattgtttttttctgataatagttgtgtctgaagatggcttctaacattgagcagcacagattttraactcactactgatcagtgctnttaargtcaggagaggtaaaaatagcagcatggctaatgagttacctttgtgtttaatctctttataacttgttaccagttcaaatgacagatttaagaaattgtgtattattttaggaatactgtatgtctgagtatttgagaatgagtggcatctattggggtctgacagtaatggatctcatgggacaacttcatcgcatgaatagagaagagattctggcatttattaagtcttgccaacatgaatgtggtggaataagtgctagtatcggacatgatcctcatcttttatacactcttagtgctgtccaggtaaatactaatcaaaattgcaacgatcttgatagtatgttctcttacttcagagttggaaattgaaactrtatcaggatttggtcaaaaagttttgttacaagtgaagctgtcctacaaggtcaatgatgtaatggcatgtattagctgaatctaaagttgatgtgagttctaaaattacactgagaccttggagggtaaaatttttatcttcagtatgtgtaaatactgtaaaatagctaaatggagctatttgattttgatattagtgaacatctacctggtggtttaaagtctttctggtactactgggtgctgagatgggaagatcaggactttgtgtggatgtgagttagtatacttgagtatcttggaatgccaagttaaaatttatatgtagaaaattatactttaaagatttgagttttcttgatactatctaattttattcaataacaggagagtctgcatatttgagaaaaggttatatacacagagacaaaaggatgtgcttgacaacttaaaaagagttgagcataagatcattagaataaacctgaaagggacatttrcctaatayttgtctttattgcagattcttacgctgtatgacagtattaatgttattgacgtaaataaagttgtggaatatgttaaaggtctacagaaagaagatggttcttttgctggagatatttggggtaatgtcagatttagtccattctacccaaaataccaatattaaaatgtactggttttgctagtaaccaktttataagtttttcatcttttcaggtcccactaagcagctggtctaactggagttaatggtctgctggaacttccagcatgcactgtggtagttatatcagcatatacaggagcactggaacagagggggccagtctaaaagataaggtaggtggaatttttttccccaatatttggtggctttgtaaagttttttaaaaactacttgctggaaagggaaaaatatttaaaaaaaaactttacaaacttgctgaatatttgagtggagggagggaatagaattttatttgataaacgtagataatctctgctttagggatgaacacagtgcaggccagagagaccagctgcttcatgggatgtgaaaaatctacttttataaagtagggtaagtttatttcattattagaaatggactaatactttgggttctattagttttcttctctttggttttcttctctttctgggctttctttaagcagcttaagataatttgctgttacttttttgtggcagggtcttggctctgtccaggttggagtgcagtattttgggagacagttgctggggctggagagctctgttgcccaggctggagtgcagtggtgcaatcttggctcactgcaacctccacctcccaagctcaagcaattctcctgcctcagcttacagagtagctgagatgtgcaccacaacacctggctggtttttgtgtttttagtagagatggggtcccctggcctcatgtgatcctcctgcctcggccaccaaaagtgctgggatttcaggcctgagccacartgcccagccccacctaattttttttaaaaagttttttgtagagatggggtcccattatgttgcctcggctagtctcaaactcctaggctcaagtgattctcccacctcagcctcccaaaatgttggaattataggcaagagctactgtgcctggtcaatttgctgttatttttgacaaaggaattttcttgggaagtaaaggcacttcagatttagctttcctcctgactaccctaaagtgaaagttaagcttgaactcaatttaaagtggtagttgtgcagtgtttgtttttagatgactcatgtatgatttggtaacacctgccttgatttgatctatttttattgtaggagaaattgacacaagattctctttttgtgcggtggcaactttggctttgttggtaagctttgaatatttgattgaaatgattaaagttcatgaatactctggaattttttttttttttgagtctgatctgctgaatactctggaatttaacaggcatctttttttttgtttgtaggggaagcttgatgctattaatgtggaaaaggcaatcgaatttgttttatcctgtatgaactttgacggtggatttggttgcagaccaggttctgaatcccatgctgggcaggtaatttatgaatacagatgaaaatgtattgtcattttggaagccagtgtagtaaaataagaaaattggttatttcagtgtttgtcaaatacacataaagttaattcgactgtaatagggcatcttacataagaattgcttaattgctatcattactttgctttatatactatatacctttctctgtcggtggattcgtctgacctaagcaaacataagtgggtttataagcaccaaaacacttttgttttccattaatttttcactaaccatacagataaaaaaaaaacaacacatttttctttctttcctaagataaattatgaacctcttttcttgtgccagagaacactgaatatgtgaatggatggctgtgaaatactagccatgaagaaattttgacaataatatttcagtgcagaattgcatactagtaatagtatgcttggattttttcagatatgtggtattaatacatgtttggaattttaagtgtcagatcaagaagaaaaacttaagatataaagtggtgttttaataatttgagttttatcacttttaatgtcaagaaattattatacacataaactttatgtctgtaattttagatctattgttgcacaggatttctggcwattacaagtcagttgcatcaagtaaattctgatttacttggctggtggctttgtgaacgacaattaccctcaggcgggctcaatggaaggccggagaaggtattgtttgataagccatattctgctagctttagaaccttgagtgaatgctgctgctttgtcttgcctgtttctatattgtaaattggccatgagcttatttattacctttccctgttgtgaattttcagtaatatatcctactaaaagactccccttgacaaagtagacccccatgagttgaaatactcattgatcctaatgtcyatttccagacagtcttgtacaggaatctccatgtttaaggacagttgattttggcaaattggattttttaaaaattagactacagaatttttgtttgcaatcttcttatttaaggaatacccagataatttggtttggagagaagattattaaattttcctccacataataggtctctcttatcaggtctgtaagggacaaatagtgaatactcatttgcaactatgtaattgtcctgtagagcaagtgcagccataagtggtaagaaatgaatgagtatggctgtgttccaattacaattattatggatggatatactygtatttcctatgtcagatggaatcttgctctgttgcccaggctggagtgcagtgacgccatcttgattcactgcaacctccgcctcccaggttcaagcagttctgcctcagcctcccaagtagctgggactacaggcgcacggctaatttttgtatttttattagagacggggtttcaccatattggccaggctggtctcaaactcctgacctcgtgatctgcctgcatcaacctcccaaagtgctgggattgtaggcgtgagccaccgtgcctgacccaggactatatttaaatgatttataaatgtaaaaactattcctacactatagatttgactcaaggattgtagcttgctgtgcccctgccctctgaatgggacgtggtggtacagtagctgggattacagtcatacaccaccacgcccatccaattttgtatttttagtagagatggggtatcaccatgttcatcaggctgatcttgaactcctgacctcaggtgatytacccgcctcaacctcccaaagtgctgggattacaggcgtgagccactgtgctcggcctgtatttttatttttaaaccttagtatttctgaataacaacgggtagagaaacacccgcagtagctgtctacaatagagtgaaataaaaagcctgaggaactgtcaacagaaaaatgggtggccgtggggagcaccgggacctgcacttgcacacaatctagggcagcttctaatgagtctatgagttactcagggatctcattaaaatgagatcagccttgagtggggttttctttatagacttctgtcaccatattttgaagagcaagggtttagttgattttaagcaggtgtgtacccccctggacagtgcttgtagaaaaacagaactatacccatggatttcatgattatactgctagcttcttggttaaggggctgagttargcattcattgcagatagaaacaaagcagatgcatgcttatcagtgagtactgagatatttagcatggttacctatgaattgaagtttggtctcttcttacccattaattgattatctttcattctaagcaagtatttcataccctgcatatcagtatatccctggatttcgtccttccacatggtttgacactttgaacatcagattacctaagagtgagacttaacccacttttaaattgttctcaaaattagggaaataaaagagaatgaaattgtggcaacttttttccctcctagttaccagatgtatgctactcatggtgggtcctggcttccctaaagataattggaagacttcattggattgatagaragaaactgcgtaatttcattttagcatgtcaagatgaagaaacggggggatttgcagacaggccaggagatatggcaagtaayatttctgacatatttctataaattatttcagcgtttgcattacttcatggttccatggatttccagggtggcattccgagtgttgctttgaaagcagtttttttttctatttattgtagagtgtatgaaggatatagaacaatcttacagaaatttcttgtcgcttgttgctaacaaaattagtatatggtaaaggtcaggtattcataatttgaagttaaagaagttttcattttgtgatctgtatataaattcttttttaaataggtggatccttttcataccttatttggaattgctggattgtcacttttggkagaagaacagattaaacctgttaatcctgtcttttgcatgcctgaagaagtgcttcagagagtgaatgttcagcctgagctagtgagctagattcattgaattgaaagttgcatagtatagttttgccattttaacatttctgtatttgaagtgcttatcgaawctaaaagtgactactgttaatattttgtatattgtgttaaattaattttaataaattatataattatacatattgtaaaataaagaccggtattttattttctgctttttattctgaagtcctgttattctgactacagttctttgtgtatacttctgtgtctgttatgttcaataactgagctarcataaaataactctaggtttctacttgatttttcccccatgtatacctttcatctgttctrtagcaagttgatgtaaattggtttgtcaacaagaatgttaactgatgaaagtggatagaacccatacatgaattaaatgatgcacaaaataaatggctgttgaaatttggaaatgattgataggtttgaatatggttattctgaattggtcacagacttaggttaaatggcaatctaccatcttaaaatggggttgtgattcggactgtccttttttttttttttttttttttttttttagcattttatatatcagaattacccaaagaaggagttgtcttcaaataaggaaacactaacgggtaagttgatggtcaccacagtatttttttgcacctgtctttttcttaaaaagctaaaatgggtacaatcactcttttttatttttttgtgacagaatctctgttgcccaggctggagcccagcagcacgatctcagcttaactgcaacctccgtctgccgggtttaagcaattcagccgcagcctctcgagtagctgggactacagccgcacaccaccatgcccggctaatttttatgttactttagtacagacagggtttcaccatgctgaggagctggagaccagcctgaccttgtgatccacccacctcggcctcccaaagtgctgggattacaggcgtgagccaccacgcctggcctaaaatgagtacaatcactctaggggtttacagttttggtgaaagtgaggtattctctatttttaaattttattttttagagacagggtcttcctttcttccccaggctggggcgtagtagtgcaatcacagctcactgtaaccttaaactcctgggctcaagcagtccttccacctcagcctcctgagtaccagggtctacaggtacctgccaccatgcccactatgcccagctgatttcttaattttggggacaggcactgtcttccccaggctggtctccggaggtgaagtaatcctctggcctcagtctcccaaagtactgggattacagggaggagccatcgtgcccgatctgaaaataaggttttttgatggaaattgagatttttctcaagtatgtttggaatgccctgtgcaataatcattccaagaacagagatgttcttaaggactgttgtcactgcatgtgggtaaaccgctgtgcataactggtttattgagatactcaacagtggcaggatttcagtagtggtgtaaattaatgtcttctaatagcttctgtatggcagtatccagataatttcgtcatgtttaatccatggatctctggtaagttggtactattggccttatttaaggaattttctaaaggtcaccactgcaaagctggagtttgaacttctagtgtgccattaactgatttatatgttagaaaccacagtactagaaattggtagatggggaattgttaactgagagatcttacccagtcagtctttccctgtttcctactctactatgcacacagccatgtgcatactatcttttgataatataactatctttcctatatttggtcacaagatcaaccttaggtgggttatgctgtgtgagcattacacgttctcattgtgtcaaaggcactgggtgtactgtgttgggtggtttctacatttaaagataagctagtgtgcttggacgtgtgggaaatgcatgtaacatttgcaataagggagattgggtgctgtgagaataatggggctaacaaatcgggtggtcattgatgggccttgcagagttctggtcagtctgatacctgcaggctgaggatgttccagtgaggttcatgtggaaagtgatgggtttgggaatggctggaagcagggtcatagacctgaagtacgtgaatccatgtggaaarctgagcctgcctgcgcctgcgcagtgcagcttagtgcgtcggcgcgcagttctcccgcccgtttcagcggcgcagcttctgtagttgggctactggaggggtcgctcagaaacctcatacttctcgggtcagggaaggtttgggaggatgctgaggcctgagatctcatcaacctcgccttctgccccggcggtttccccgtcgtcgggagaaacccgctcacctcagggtccccgctacaatttcggactccaggagactccacagagccgcccttcggtccaggtggtctctgcatccacctgtcctggcacgtcaggagctgcgggcgaccggagcagcagcagcagcagccttccctgccccgcgccaaactcccggccagctcaaggcaaggagtgattgggtggaggagtctccttgaggctagaggccggcagttcatggaggctcgggggcacgtgggtggtggttaccacagtgaagttgtgatttggttggggcgtgagatctgagtgccctgggaatttggtgagtctgggtgattagaagccttgacttttcaaattggttctattgcaagaccttgactgtggatggctcagttctgagaaaggctgaagtatcccatataacgtccctcacagtgtctgacaaatgacagtttgtgcgtgagtttgctgatagaagttgtgagctgatctttggctgctgaatttaattctccaaatcctgctaaggtgggataaaatagattaaattgaacatttcatctaattcaggaaaataatatgtttagtattaaaagatgtgggctgggcggtggctgacgcctgtaatcccagcactttgggaaaccagggtgggcggatcacttgaggccgggagttccacaccagcctggccaacatggtgaacctcccacccccatcccctatctctactaaaagtacaaaaattatctgggtgtggtggcacgtgactgtggtcccagctactcaggaggttgaggtgggaggatggcgagtccgggaggtcgaggctgccgtgagctgagattgcgccactgcatttcagcctgggtgacacagtgagaccctgactcaaaacaaacaaacaaaaaagatgcatgtccttcaaatcatttattattttgttagtctctattcatgacaaagcatcaccatttttcacacacgattgcaacacaatggtaaagtaacaaataccaaatccaatggtcatttttcagttcatctcatgtgacctttctgctgtatttaatgttcttaatttctttatttttagaaacagagtctcgctatgctgcccatgctggtctcaaactcctggtctcaagtgctcctgcctcggtctgcccaagcattgggattacaggcatgagccactgctgcctggcctatgtttaatgttcttgactggtcttctcttaaactcttttaatttggcttccttgattccacttgcccctgtttttctgctacctcccagagaattgctgtgcccacctttgttcccaaattatgggcatgtcattaaagctttttttcctaggccacttctacctagatgtgactatctccacagctcagatctcatctacactccagacttacttcagactgtcttctgaagtttttattgatggactaatggatacctcaggctgactatatgattaattaaattcctctctgcacttttttttttttttttgagacagagtcttgctctgttgcccaggctggagtgcagtggcatggtcatgactcactgcagcctcaaattcctgggctcaagcgatcctcccacctcagcctcccgagtagctgggaccaaggcatgtgcccctacagatggctaatttaaaaaatttttttgtagagacagtgttttcctacgttgcccagcctggtctcgaacttctaggctcaagcgatcctcctacctcagcctcccaaaatgctgggattacaggtgtgagccactgcacctagccctcaaactcttaagtgttcttccatccttgtagcttacttactgtaccaccagagttatgtggaaaatgatcttatcatgtcccttgccacttaaatcagtagacctgtatctgcaggtaaaagatcaaactctctagaaggatagccaaagcaattgggatcggtttctaatctttacagatttatccctcatcatttaatatttaccctgctttctaacaaaactgagctacttgcaattcctttaaagcaacatgaatgttcacattgtcagtctaatccctctcttcatcagatgcttggtcacccacttatttatcagtaatgataacattcactaatttatatgcacctactttgttctggcttcttactaggcagacggtatctttgatcctcacaataattttgcagagtagattttttttttgttcctgttttacagatagaaccaaggcccaaataggcgaacaaaggttcaaattatgttagcagctggggataataatctgcgctctcaatgaacttaaggttcagtagagaagacagacttaaaaatcaacaaatacacatttaagaaataactgtatttgaggtatttataatttttgaggtaggtataattaaagtatggggacaaaagtgggaaaagacatttcacagagtaagtgcaccttgaactggtcttcaagaataagtaggaagaagaatgccagccaaagggaaacagctggagcgcattcttgagaaaaacacgtgcaaaggcacagaagaatcatgtaaaactgctaataattttgcttggctagagcaggagagtgatctaggtagataaacttgaatgtagatatagttgtgagaattagatctgggagacaaatttaacccagagaccccccatattcaacaccaggtctctggttttggtgactggatagatggtagtagtattttctrattctgggaattttgtaggcaaagcaaattttagagggaagatgatgagctctgttatggacatgctgagtgtgaaaagcctgtgggatatccatatatttatattaagataattgaatataggaaactagagctaagaagagagaaacttgagggaaatatggatttgaaagttaccagtatgttgggaccacagcagagaatatgaagattatatagcaaaayagaggtcaaggaagtaggaggagaattaagacaagtgaatgagtttcaagaaagggtatatagtctaaaagtagtctgagaacaagaaacagccctctccatctccagtttccgcatctccagtttctggcaaccactctcttccttagctccctaaagcctaggaatgctaatggagcacattttatgctggttctacacacgtctttatgatagcacccctacaccctgtccacacctttgtaaatattctctttatcaaattatcccagtttgagtatatcattgattcctgctggaacccatataatgaagttatattttaccctatggtgagtatggggagacacataggaattgtaagaaagagagatactgatcagatttgcttttcagaaagattattggtgatgattcgaagaatagattagagaggtgtaatactggaagcaaggagaagaagaagtaggaaacttgcacaaggaccaaagaagatacaggcttaaaatgggctgggaggagtagagagggatttaaattttagtgatgttaaaaaaaaagaattctagcactcagtcactgagtgttagggttgatgaaggaagaattgagaatgtctcctaagcttatgacttgagtgacaagggacaagctggtacaattaaccatactggtaataaagaattaattttgagggaaagatagagttcacttttggacatttagaatgctgggaagatacctaaaggtttatgcccaagagatagatatagtgacctggagctacattgtctgatagaatattctgtgataatagaaacgtttcatacttatgctgtccgatgtggtaactagtagccgtatgtggcttttgaacatttgaaaatgttgctagtgtgactgaggaacagaatttaaattgtatttaattttgatttagttaaatactcacatatgctgctttattgaacaatgcaggtatagagctgagaacggtttttgcacttttgaaggattaaagaatcaagaatattttgtgatatt

SEQ ID NO: 95099 - DNA, 44867 bp, Homo sapiens
ccaccaggctcagctaatttttttgtactttttgtagagatggggttttgccatgttgcctgggctggtctgaacacctgcactccatcaatccacccacctcggcctctcaaagtgctgggactacaggcgtgagccactgcacccaatctactaagtcttattcattctttctaactatatattttttgtacccattaaccaccaccttcccctctgcctcccttaaaatataatttggtaagtgctatgctctgggacgtcccagcagcaataaaagaatgggagagaagtgctaaccccaaatgagggagagagtctgcccaaaaaaattactttggggaagtgaagaccaagttgagatgtgatgtgatgttagcaagaaaaaggcaggaagcaggggggtaggtgagagccagcagaggtctatgcaacgattcatatgtggaaaagaatacatggcatgttcagagaactgaaagaatcattgtggctggagcatggggtgggtgatgtggctagagaggtaaactgaggccaatttttgcatggcctcatacatcacagtgtggttttgactttatcctgaaggtaatggagtgtcattaagatgaaaaattcctattcttcctttcctttgcctcattttttgctcacattttgtagacacacacacaagtggctttaaatcctttcttgaacaaagtgaggacataaaccaacaaattcactaaataacataattacagctagctcaagtgatgaaaatccaacatcatacagtcatattaaaataacatacagccaaaaagaatatctacatatgcacagagtgtgcttgaaggataaaccagaaactggtaatagtggttgcttctgggaggaaacttgggtggctggggaacaggtatggaaggagagcttttactgtgtattcctttttaacactcgaattttacgccatttacatatctattagaaactaaataaaacataaatagccccaatctgggaaaaaaacaacaaatctatcactagttgtaggctccctcctgccccatttctcaaccagataatccattagaatgccagactagagtgacagcgtattcatataaaagtagaaagctcgaggaagtcctggagaagaaaaaataagcaagacttgatgatgggcagaatgagggacagaaacagaaagacaatccaaagcaaaccttcgcgtgtgctctcaggaaggtgtttacatgtgttcagtcttggctccatcgtctgtaatatagtaataatgacagcatttgcattatagggtagtagtgggagttacagatgctagatgctggttactaaaaggtccacaagacgtacttgataaggaaagtgacacacagaaaggctaagtaacctcaaagagattccaatctggtatggaggagacagataagtgaacaggcaatctcagcaggctgtgataaacgcctcagaggaagcactgggtgtgccacggaatgtgcgggaggcaccctgtcttagcctgggttccctaggaagaaagccggaggtaggttcttgagtcagcgagtgactgaggaataacctcaggtgaagactgtgagggagcgaggggagcatggggcggggaaaaagtgagacaaagatatgtgtttagctcaggagttggcacattttggccttcagacccaagctctatttctgtaaaagagtattttgtgaacacagctatagttctattgaaataagtcacattcatttaatcgatatattatctatggctacttttgcactatgaaggcagagttgagtgattgcaagagaccatatggcccacaaagcctaaaatacagactggttcttttcaggaagtttgcctcagcctgattccacggggagctctagagcaccaatgggatcatagagttggcccacgtgtaggcgaggcgcctggctcacctcaggacctgggcttggaagagaacttggggttcaggacacatccagcctgggaacatcaatttgggagtagtcagaataaggattttttttgtttgttttgttttttagacggagtcttgttctgttgtccaggctggagtgcaatggtgcaatctcagctcactacaacctccgcctccagggttcaagtgattctcctgcctcagcctcccgagtagctgggattacaggcctgcgccaccacacccagctaatttttgtatttttagtagacgggatttcaccatgttggccaggctggtcttgaactcctgacattgtgatccgcccacctcggcctcctaaagtgctgagattacagacgtgagccactgcgtctgggccagatggttttaatgactagataatgactttagagagaagggatcctagaactgaggcttggggcaatgtttatagttcaggatagaggaaaaggaagaggatctaggtagggagatctagaaggagaaacctgtgaaataggaaaaaatgaacagcaagtggtttcctagaagccaagtaaaggacacccaccttttaaggaggaaatgatcagctgtgacaaatgctcttagggaagtggtcagtttgggggcagctctggggctgtatagctgcacctaggagcccaaaaggagactgggcctatggtgggggagagaagcagcccaaatatgtaaatacatacacatgcgcacgtgcacacacacatatgcattcatgccatgcacatacagccacactgttgtctatttttttttttttttgagacggagtctcgctcgtcgcccaggctgaagtgcagtggtgcaatcttggctcactgcaacctccgcctcccaggttcaagtgattctcctgcctcagcctcctgagtagctgggactacaggcgcctgccaccacgtctggctaagttttgtatttttagtagagacggggtttcaccatatttgcaaactggtctcgaactcctgaccttgtgatccacccatctcaggctcccgaagtgctgggattacaggcatgagccactgcgcccagcccactgttgtctttatttgggacttacggacattagagattggagtctaggctgatgtacaaagaagaggtctgagaacatggaggttaatttttgacgagatcagtttcagtgaaattatatgagcaaaatatccagattggaatgagttcaagagagggaagaaattgagacagcaaagtacaaacaacattttttaggagttgtgctgaaaagtgaaacagaaatggagggggagctagagaatggcatagagtcaggagaggggttttaagatggaacaaattgcagcatgtttgcatcacggtagtggaaaagatctactagacagggaaagactgatgacgcaggaagggacactctactagacattcttgagttgatgaaaggatatggcacttgcatactagacattctttgagttgacaaatggatatggcacttggagcaaagaggaggttgacctctgggagtgtgggcagtttgtccacagtaacaggagacaacgcagagcttgtgcgcagataaaagtggttggtggatatgaaaaatctactgatggcttctattttctcgtgaaatgggaagcaagaccaccagctgaggagaatatgggggaggagatggaagagctttgaggaagaagacaatgtcaagtggtcattcagaggagtggttgggtgaatggctcatttttccatctcccatagcatcttcattacctcagcaagtatgttctcagcatctgttatgttccaggcactttgataaacatcaaatgcttcttgaaagaagatgtggctgtagagtaccttcaaagacaacccaaactttttttttttttttttgagatagagtctcactctgcccaggctggagtgcagtggtgggatcctagctcccattggccttgaattcctgggttcaagcattcctccagcctcaggctctggagtagccaggactacagatgcgtgccaccatgctcagctaatttttgtattttttgtagagatggggtctcactatattgcctaggctggtcttgaactcctggactcaagaaatcctcccaccctgtgtcagcctcccaaagtgtcaggatcacaagtgtgagccactatgcctggcattccaaacattttttagatttggagctgaatgcagcatgggcaggttgtcagggttgaagcactggtgatccagatctggaaggagccagaagcctctaaaagaggccactgcaggagcctcctgacctggtttctgggaatccatctgcttcaatgattttcctaaaacacaaatctgatcccatcacatctttttttttaaaactccttcagtgaagatagttaagaacttgtggcagactgcttctagagaacaaaacaggaacactggggtacagaaataagagatttacttttcatggatacccttgtgtagtgtttggggaaaaattataaccatgtacatatattcactattcaaaggaaggtcaaaagcctctcaaaagtttctacagctttccactatccctaggagaaagaaaagcctttacttggtctataatgctcttcaccgtatggccctacccaactcttcaacctaatctcatgttaatctcgcttcctgtggcccttgtggacttggctagactggccttccaattcagctgtgccggcctctttgggcttgtacacaggcttttccttctgcctcacttttaaaaaaaaattattattactatttttattttatttatttattctttgagaaggagtctcgctctgtcgcccaggctggaatgcagtggtgcaatcttggctcactgcaacctccacctcccaggttcaagctattctcctgcctcagcctcctgagtagctgggactacaggcacccaccaccacgcccagctaatttttgtatttttagtagagacggggtttcaccatattggcgaggctggtcttgaactcctgaccttgtgatccgcctgcctcggcctcccaaaatgttgggattacaggtgtgagccactgcgcccggcctactattattatttttataagaaacggggtctcgctatgttacccaagttggtctcgaactgttgggctcaagcatgtctcactttcttatccccgcctctccctttcccatctttgccgtctacttaggtctctgcttcaaagttactttttcagggcgggcttcccgcctgaattcccaatcaccaccggacttgggtcagtccccgcgctgggcactcactgccccggcaccagcatctctgcagcaagcacccataacaaccataaagtgtaatgagctgctcagtgtgcctccctacatcgttagtccgaggagagggtccctcggtgcccagcacagtgcgtggcacagtcggtgctcagggagcgatagctagatgaaaccgtacttttcgggatcctagtccatccaaagcagccgccttcggggcaggtgtggggaggagggaggccgacgaggagccaacgccgcgcgaccctccgcacttccgtcttggaggccagggtggcgctgccgccgtccctcgcccggaggcagagatgcgctggcgcatcaccgccaggagcccacagtgaaagaccatcggatggaaggcgacgcccagaactccaggagaccgctgtgggaggacgcgaggccaggtgacgaataggccaggcgtgagttcccaaacagcctcctccccttcaagagagtaagcttgggccacaggctgggacggaagcagaggggcagacacgccaccacccgcccggcctcgaacctacggcggcacagttcagcggaggcggcccagcggtcctgtcccgcgcctgcgcactccaggccccgccccgccccgcgccctccaggcccggcccgccctccaacctctgcgtgcgcacagcctagagcccgcctccgtgaaagactgccgggcgcatgcggtcggggktgttcactggctgtccggggctccgcgcgcgtcgccggcccagctctgtcgctgacgggaggatctgaagccggccgcaggtaggctgactccagggatcccgggggggatctgttctcccgcgcaggagtcagcggcgcgagctgagcccggcgccgaatagccccgccgccgcggtgacggacgtcgctcctaccaatcaggggcgaggtgactcggcgtcctgcccaatgggctgtgtgcctaacgggagtggggcgggcgccccggccggcgagctgccggctcccgcgcgcgggcctcgtggccgggcggcgctggggagaggggccaagcggggcgcggggcggcttcagaggctgcggggcctgcgctgccgcgctgggccgcgccgaatcagctcggccgggctcgtcggacggagaaggccgtaggggagtggagcggcgcccccccccacaccctccgcccttgctcttcgtctgcgaggaagcccggcagtcgcccatccattcaagcagtgcgggcctcgggcctccggcctcggcgcgggctcagccgcccggggctgggcgcggcagctccgcgccgtaggacgagggggcctgcgaactcgccggccctgggccccgcggctggcctttgggcctcacggcttcctcccttcccggcggccgggggtcggggcgctggcggtgtatagagctcaccacgtttgcgtggcgcccttccgtccacgctcgttacagtttcgaatcctcagcggccctgtgacgcgggcggcgcagagattctcacccccattccccgaggtgagaacccgcgttgcaggcagctcaagtgacatgattgaggtctgcacactagtgatgggggctggcacttcatctcataacattgaaagaaaaagcatttcccccctcagtctttgttgaatttctctgatgcgtcttgatttacgttacttctgtgccggaaaaccttcttgcgccttccgtcaccttcaggattaagttcagattgggcatgccagtttgcacatgatctggcccttgcctacctttccagtttatcttccactgtatatccctgcttccccgccttccccctcacggccttacctctgttctctgtagctgccctgcacctgcctgttcaccctgttccctttcctgtgctctgagtcgtgcagtcagtccttcaaggcccattgcaagtcatatctacaaaacaggagccgcctggatccgcccactacccccaggacttgtctcaccttcctctgatggccatggtactgaaagcgtctgctctcatcgtccccctttatagtctaaacatgttttctgtctgcttccaccgtcactgaattactcatttatttgttaatgtttcatctctccaactggactgccagaaagttgagatatgggcccaaatctgattaatgtttgcagtccccaagcacagtagctgtcatgtaagtcagtagcccataaggatgaatgaatgagyctcccgcctgatctttatgtacactggcatatgtattgccaggcactgagactgcaagaatctaaagagagaaactaaagaacgtaaagagagatgttaaactcttagagtaaaattgggacaaatcaaatgtaattggatgagatgaatcttttgtagaagtaactcactcggtggcagaggaatttctaggatcatccaaaacttagggagaccagggtatagtctcagtaaggtatatgtctggttagaacatatctaaaatgtacctaagactgattttcatgtgtcaataaggaactgtaaagtgagagacttagggtcagataagcttggagacaccgcatactgtatagcagtgatcacagtgcgagtttacttgctaaacactcccaggattcttgcgttaaatgacttggtttaatcagcrtttctctgatttatatccataacaccctttttgagaatcccatgtgcattttgttgaaaccagggagcatgcttttggaaatgctgcagcagaggatgcaaagagcctttggagcggggaagacttctgagcattcttccttccctgccaagtgtgttctttcttgctctrgggagggggtggggcgggggaatgcttcgagcacaactccttagttttcttgttccttagtttatttttatcataatttggcttcacatggaacgttcctgaggaggaaaatgtcctgaccatgccaaagtaagcattttctgctactttctaattgtgtttttcattttggtcacatttgggtttgctgaccaaatggacgatcctggacctctgaagctggggaccagtgataaatcctccgtggtgagcctgtcacggtctcctcacctcttgtcgatgctgttttcacctgcatcttgactctgctgcccttatatcttatttctcctttccctgccaccgtggcactgctttttggatttaatctcatctcccctctctttgagtcctctgcccgtcatgtgcttcagactggtttcttatctgatgtccctctcccccagtatttacagtctctcttcattgcatgcctgggagagatttctgacaaggagcaagttgttgttaaattatagaagagaactactttttttttttttttgaggtagtcttattctgtcgcgcacgctggagtgcagtggcatgatcccagctcactgcaacctctgtctcctgggttcaagcgattctcctgcctcagtctcctgagtaactgggactacaggcgtgcgccatcacagccggctaatttttgtatttttagtagagatgcggtttccccatattggccaggctggtctcgaactcctgacctcaagtgatcctcctggctctgcctcccaaagtgctgggattacaggcatgarccaccatgcccagccagagaactacttttaattaaaggaattttggtttagctgcaaccacttttaaatgttgatgttctttccttttagtctatcttttgtaacctagaggagctgtgttttcttgatgatatgttgtagtttagccaaagacattatttatttcctggagaactggagtacttatccaagtttgaatttttttcccatgtagggaaaataatgaggcacctgcctggtatcccagtgtctggcagtgatgtcagcaaacatttggggtgtagtgttctatcagccagcttagagctggttttattaggttgactctgaaggttattagaagtcaaagctttaaacaaaagctgtgttattagagtagcagttgtttttctacacgtatttgactaaagccattcagtgatccaagaaatgtttgttttgatcctatttaaacctgacgagaaccttctgaagtcctgtgacagagaaactgaggcttcaagagggttcatagctaataattggcagagccagtgtttgaacccagatgagtttggtttgttgagatacatttatatcatctgtaatttttccttcttccaggtcaaagagtaaaatgaagtacattctggttactggtggtgttatatcaggaattggaaaaggaatcattgccagcagtgtgggcacaatactcaagtcatgtggtttacatgtaacttcaatcaaaattgacccctacattaacattgatgcaggaacattctctccttatgagcatggtaagcacagtggatttcttcataataattgcatgtggcagaacatgtcagcacttgggaattatgtgcacggtttgcataacttttattttctgccttctaacaggtcccttaatacagcagaatgatacttttctcacctagaaaggaagaagcagaattctttttttttttttttttctttgagacaggatcccactctgtccctcaggctggagtgtagtggtgtgatcatggctcgctgcagcttccacctccttggctcaagcgatcctctcacctcagcctcctgagtagctgggactacaggtgtaaatcaccatgcctggctaatttctaaattttttgtacaggtggggttccactgtgttgtccaggctggtcttgggtcctcccacctgtaatcccaaagtgctgggttttataggtgtgagccaccatgcccractgccttttacttctttgttgttattgagaacctgtcaatggtgtgacatacarctgtggctgttacttcaaagattaattgcttaaaactgggagagatgttaaaacatacctcttaagttttaaaattctgcattcgtactcctactctctagcgttgaggtgaaaatatgcaagcattaaatgtcactagtgcagaaatcctcgtaacaaatggcawcaggaaaagatccatatacctgagtgatatttaatacagaattcttgagcagaggatgagttacctctctgagggagaaaatgagactttttttcctttcctgtgtttgagcttgtctcctattgtgatggtaggaatgaatcattctgggcaaaatttctagagtgaagtttcatggaatgaatgtgcaacaaaagaatggggtaaatatgtgcagtttcacaaagttgtttagaacaaaagcagagctcggaagctgatttttataatcagcacaagcttaatatgcatatatccaggttttgaatcaaatattgttatcatactttaaaccatattatgctcaattaggagacgtttctgaaggttctttttccctaagcagcagatgctgtatactactgtaaagtcctgtatgcacagcccactgggctgtcatttcttcccatcccatgctattttataactcttcttaagaatgagtttgttgacaggctagaagtatgaggttaccttttagagaatagctggtaatttttctttttgtgtgtcatatttagtcttctagaagtgaatttctgtgcttcctattaygtaattgcacaccttgttaatgagtgttttatttcaggattgcagttgtgccatggtataggtatttttcacttaacgtaaatggtttctctgttcactgcaggtgaggtttttgtgctggatgatggtggggaagtagaccttgacctgggtaactatgagcggttccttgacatccgcctcaccaaggacaataatctgaccactggaaagatataccagtatgtcattaacaaggaacggaaaggagattacttggggaaaactgtccaaggtaatactggatttacctttaaagcttaaaagtcttaaccagtttaatttcttctccctcccacctctacacagatgtgtaattcccttttgagtacagaagtttacattgtatgtgatttcagcatgaaactctcaaggtattgttactgaaatatgccttcagttgaaaaatcagaattatattgttgtttgctaaaaaaaataatttgaagaactacttcttcgttgaagcttgtcaattctgccaaggcagcatgatacgagtccagagagctgttgtttttacacagtaatgagtgtgaaagtggtaaaggcaactcgattagggcattaagccagatggcatgtatgtgtgcatctgggacttactatgtatagaagtgagaaggaaatgaacatctattgtgtatactggtttccaggccgttcatcagtgccatatggcctaggaggagcctgagaagtgggtttctgggtcctcccaagctttcactggcacagcttcgcttacatctatttgctgttttggggttttgtacaaacattcatttaaggaaaatgttttgctgctttaaaaaggtggggatggaaaactactgatctagtataatggcagtggcccaaatttggagaggttgctgaaaagtggctttaatctgagttatgagagcagatctgcttttggctttagactttactggcctgaaagctgagggtcacactgacagctggctctggtctggggctgccctggcaagattctgggctaaytgggtcatgtttggatcttagcttcccctctcaccagctttgtgaacatgggcaaattaacctcttcaaaatgtggattccttttctgtaaaatggagacaataacaacacctacctctctaggttgttaggaagattaaagaaactaaaagtcagtgaagtgtttccctgacttcctgacacatagaaaggaatcagttaggaattagaatggttttgatcttacagtttgctgtttatttattcatcatccatcaaatttgcattgaatgctcactgcagtcagaccctcactggtgctggtgatgcatgtgatgagcaagaccagagaagtcattgcccacatggaggttacctgtgggggaggcaaacaacaaacatgaaacaaaacgagacgtctgtcagaagctgtgaagaaaccaagtggagtgaggacagagtgactggggaaagccactttgggcaggtggtcggggagtctcccaagagaggccatttgagctgagaggccagtcacagcgagagtggaatgagaagtgcggaggcgcagggctacgaaggcgtggttggtccgggaatggaggggaggccggcatagctaaggcagagtgactgagggagatggtcagagagcgggggtggtagccacagccaggttctacccagtcgctgggccgcagcaagaagctaggagtgtactcggaggagtgggaagccaccgaaaagttgaagtgtgggagtgatgaattctgacttgaattttaaaagatcactttgacgccatgtgtggagtagataatgaatattcttctgcgtgaggcaaatgaatatccttgtgcatgaggcattgctgtaactggagtaacctggagttaaacagtaatcttcaccttttaggaacttgccatctgtgcccaacaactatgatttttgaagtgttgagcaattgctggcattctttgagcattgacatggcaggcactttaccgagcattttacaggtgctgtctcacaaaatttccacagcttaacaggtggggaaaacaagcttaaaatggttctataattggcccaaagatccacagctaacgagtcatgagactaaggtttgaatccagacattctgaccccgggtgctgtgcttctaaccactctgctgtgctgtgctggctcactgcagtggattgtctaccctttggtaaactggaaacatatggaacagggtcccagaagtctcttgttcctggaagtgcactgaagtgtaatgtgcctaccttcagctgtgagcaatagggttggctatactggtgtgtggccaaaagggtagactctgcacaggggcacgtgcgcctgtgtggctcaggacactgctgtcagccttgctctgttgcagggcttccagcaacaacttagacatctggctgcaggaagtgtgagctcagagatttgttgaggccagttaaagggggcctcaaaagtatttttatgaccctattgctactctctccaggcaaagagtgctgcagtttgttttcacagtaagtgcatttgtctcaatcaatgtagatggacaagcgtaagttccctgtttgttttctttttcccagttgtccctcatatcacagatgcaatccaggagtgggtgatgagacaggcgttaatacctgtagatgaagatggcctggaacctcaagtgtgtgttattgaggtttgtatgattcctgcacatgtgaacaagtgtactcatctccttagtcagccatcaataactgataagacagttcccagtggagcccttggccttcctatctctggtgcagtatgttgcaatgtggcaggtaagggcacagtaacagtcatgtggaatggccacgcaagggaaaaccgtagtttgcccagtgttccttttttgtagcatttatggtacaatcacttagtactgattgtccccatgagtagtgtgacacattttcatctgtctcttgagcaagtcagcagatcttttgctttcgtctkgcaagagcattcgtctccgaatgagcttcatttggtttcagtatctgtactcctgctgtgctgatcctagctgttggatctcagtgttcctcagataacaggagactcaaaagttccagcagtttgtttataactaatactttttttttgagacagggtctcactctgtcacccaggctggagtccagtgcagcagtcatggctcactgcaaccttgacctcctgggctcaagcagttctcctaccttagcctcccaagtagctgggactacagtgcgcaccaccatgcccggctagtttttgtacttttttgggagaggcagggtttcgtcattttgcccaggatggtctctaactcctgaactcaagccatctgcctgccttggcctcccaaagtgttaggattacagatgtgagccaccgtgcccagccaactgatgctttttcagtacaaaaattatttatggttaactaaggagataagatttaggtttttcttttttttttttttttactttgtcactgtgatagagataacattcctggcacctctctcatctgacctttttcttgaaatgatgtggaaagttccataataacctttgggaaggatgagcctgtccaaaagaataaccttttagtacaaagagttgtctaattcctgttaactgttaactaacattatacagggttagagagtccgtgttacataattactgatactgaatcaggaagacagaacagttgttagaaaactaaactgccagagaagggtttagtgcctaacctctgaaacaactttgttcttctagcttggtggaaccgtgggggacatagaaagcatgccctttattgaggccttccgtcagttccarttcaaggtcaaaagagagaacttttgtaacatccacgtcagtctagttccccaggtaagtaagacattgaaagttttactttgggggagatggagargagggaggaaaggtaaaccggaatgattttcactcattgtctagtagttttcacttgaggtgcaggaagcagagaataaagaactttgtaagtttaaatttgttacaatcatacttttttgaaaagatcaaatagaaaacatttgaaaaatcagggcagttgcatttgcagatgtagattggccgtgtgcatttgtctttactatatggtggaactagagtaaagaggctgtttttaaagacaaatcttgtggagaggagtcaatagtaacaaaaattgggaagccggaaagcagatggatgcatagaaccgactaagctgaccttgagtgccggatcttaagcccgcagcagtgaaagcagagaagcagccctgtttgccctgcagaaccccaaaagctcaggagtgggatgagggtgggcctcatgtaactactgcttcagaagactcagaccctgacatctttttcctacagtgcacagttgggcgttagcctcctcccaccttggcagaagactggaggcttgttctctrgggagggttcctggatgagcagacagtagggacagttgagggcagtaacactggactacaaacatggggttatgtgtaatgttaacgctgttgacagtccttgccttcttccaccatttggttcccagaatcatcatgtttaggcttggccattccacgtaggaggttgtaagattgtcttctggggtatggatagcccaggataaaagacactggctctggcggctccccatgaaataagccagccagattttcaccatgacaagcctacacactcacacataacttataggtagcatttaagcaggcctccatacacttggagaaagcatctgataggtaagagaccaaacaacagaaagaaagaaacttacagggaactgaggcgctacaagcagaggaaactttaaaaaaacaccaaaaaaccaaaaatgacctgtcattactattcttagaaaattagaaggagataagctatatccgttaggtaagaactggatgctataagaaagaaacattgagagaacagaaaagaatccttggaaattaaaaattagatagcagaaatgaaaaagttaagagaaagtaagttgaggaaatacccaaggaagtacagcaaaaagaccaagagatagaaaataggagagaaaaggtaaaattagaggactggctcagaagttctaatgtccaaataataggagttccaaaaaataagaacacagaaatggaggtataatctgaaccccaggggtcagcaaatgatggcctatgggccacatgaacctacccccccgtatttggaaatcaagtttatggaaatacagctgtgtctgcttgtttatgtgctgtctgtggctgcttttgctctagaacagtagagttgaatacttgtggcagagactgtgtggcccacaaaacctaaaatacttactatcagggcctttacagaaaaaattttctgaccccttatctgaacaattcaaggaaatttctagacatcagtttctgggttgaaagggcccccttggtgcctatcatattggatgacagatgacctacaccaaggcatattrttgtgaaggttcagactaatggggcagaagttctaaaaggctctgaagagaaaaatcaagaatcattgtgccactggaccccttagcaacaatactggaagctaaaagacattgatgctatttcattaaaaattctagtggaggctgagcatggtggctcacacctgttatctcagcagtttgggaggcagaggtgggaggactgcttgagcctatgagtttgagaccagcctgggcaatgtgacaagagcctgtctcgatttaaaaaaaaaraaaaagtccaacagaaaatgatttccatcctacaagtccatgtgtaacgtgtatctgttaagtgtgagagaagaataaagatgatttagtacagaaaggaaaagtgtggcacatggtttgggaacagtatttaaatacttaaaaagtatgtaaacccaaaagaggactgcaggcacaggaaagtgtctaatgggggcaggatcctcatttaacagggaaatcaatagaaaatgcctccaagtaaatgkggagaagtagcacaccagcaagatcagttaagagttgaagagcggttgtttctagggattggaaaggggagagtgggtgagggccgatactgcttacaagctcggttagaaccatttgattctaaaatgcatgcaygtgtaactttgacaaacataaaagctaaattacacaagtgaccaaatgatctatttccttattaaaagaggttcaaggaaaagtcatacttgaaaattccttatcagagggaaactaactttttttttttttttcttttgtgaaatagccaagttcaacaggggaacagaagactaaacctacccagaatagtgttcgggaacttagaggacttgggctttccccagatctggtaagatttcctgatagctggttgcagtgtaatcttttatgtctagttaagatcactctatcatgacagacaagacctttgtcttgttgggttgcttttgataattgatgatggagaaaataggattagttctttgaaccgggctgtagtttgcaagatgttcatacttagagcgtgttaggtcttgtactccccagaccttatttttcctctcagtctttttactctcatttttactcctacttgggaacactaatggaggaaaatcccagagctcttgtagttcattaatgtattcatttgtactgccattctcttatgtttctccagtttggcgtttacggattttagctttgaaacgagtcataatatttttatggattatgtgcctggtgctgagagttaacgttttcgttcatcttaacaatgtgatgtctgttttaatttcagtcaggagaaacccctacttctgtcattttttccttctgtctaagccatcttgttctctactgctaggttgtatgcaggtgctcaaatccacttgacacatcagtgaaggagaaaatatcaatgttctgccatgttgagcctgaacaagtgagtagaaattcccatctctaataagttgttttttgcttctaattgtcctaaagcctcttgatcagtttcgtgaggcttgttattttctaattagagatagtgggctgttccagaagaacccattgccatcggccattccctgcctctcctggttccccaaacaacacctgtgwccctcctgcctcttctccgtgcctcgttgtactttgtgcttcagccgggtggagtatctttcggttcccctagtaccctccactctccctatgattgtactttttcactggctaatttctgttaagaacccatgtccccctcttcctgttggcttggcagtctcctactcactctcatccttcaggttctagcgaagacatagtgttgtctgagaagctttaactgccaaacctcctggcccttggccttcagggttaactgcgtccttcactgggctcctgtgtggtgtcgcatgtatgctgctgatgggcccatctttctggtgtgtgtgtgtgtgtacatgtgtggtgtgtatctcccttcacagactctaagcttctggagggcaagggccacctcattcaactttctgtttctggtgcctggtgtctagggtgttgtaggctgtcacagagatcttagtgtttttgttactgtacctatgatgcaggaaatccaaaatttggaacctgtaatgtatctaagtgtggtgcttagtatggaaattctagtggtgatacattgagcatgtagctttggccaggttttagatatttctggcctagcaagtgaaggaaattcaattctgtagcagaataggttgtcattaaaattgttcaattttttttttttttttttttttaattgagacagagtctcgctgtgtcgcccaggctggagtgcagtggcgcgatctttttggctcactgtgacctccacctcccaggttcaagcgattctcctacctcagcttcccgagtagcttggattacaggtgtgcaccaccactcctggctaatttttgtatttttagtagagatggggtttcattatgttggccaggctggtctcaaagtcctgacctcaggtgatccacctgcctcagcctcccaaagtgctgggattacaggtgtgagggcgcccggccttaaaaatattcactattaaaaatgtaacaagtatttccacatttaagtttaagtttcagattttttgctttttttttgagatggagttttcactttttcatccaggctggagtgaagtggagcaatctcagctcagtggaacctccacctgctgggttcaagtgattctcctgcctcagcctcccgaatagctgggattataggcacctgccacgatgccgagctaatttttgtatttttagtagaaatggtgttttgccatgcgggccaagttggtctggaactcctgacctcaggtgagccacccgtcttggcctcccaaagtgctaggattacaggtgtgagctaccacgcctggccttgccttttttttttaagagacaaggtcttgctgtgtcaccctgactagagtgcagtggtgctgtcacagctcactgcagcctgggcttaaacagccctcctgcctcagcctcctgagtagctrgtaccttaggcggacgctaccatgttcagctgttttattttttgtagagatgaggtcttgctatggttgcccaggctggtcttgaactctttgggctcaggcagtcttcttgcttcagtcttccaaaatgttgagattacaggcgtgagccggcaatgcccagccttacttactcttttaattggaatgtttatcttactgagttgacttgatatagtctgaatacaagtctttcatcaggtatgtgattttcacatattttctccctatctgtgccttgtcttttcattttcttctctcttttttttttttttttttttttgagatggagtcttgatctgttgctcagactgtagtgcagtggcatgatcttggctcactgccatctctgtctcccgtgttcaagcgattctcctgcctcagcctcctgagtagctggggctacaggcatgcaccaccacacctggctaatttttgtatttttagtagagacggggttttgccaagttggccaggctggttgcgaactcctgacctcaggtgatctgcctgcctcggcctcccaaagtgctgggattacaggtgtgagccaccgcacctggccttcattttcttaatagtgtcttttagagcacagacacttttaaatttcgatgaagtccaatctgtttttttcttttatggattgtgctttcactgtcgtgtctaagaactccttgctcttaaccaaggtcatgaagattttcttgtaaaagttagttttaggtcttacatgatccattctaggttaacttttgtgtgtagtgtgaggtaagggttgaaatttttacatgtggatatctacttgcctcagccccatttgttgaaaagactatccttggatactattctgtactttttaaaaataaaggtacattatagatttactaatcttcataaagttgtttagacttatttatagctattcataatttttattactaccgtgtatttttaaaaattatattttctgattagataataccccatgtgtaggagaccctgctgacctctgtccattcatctacagcctagcaaccttactaaaattctattagtactgattgtttacctgtaaattcttttggtttttatggataagcagtgatattgtatgcattattcagtggcaaccgcttcttgttttctggttcatttttttttcttatctaatgataatggctaatatcttcagtacatcattgaatagaagtactgaaagtggccattctggccttgttctggactttaaatagtaaacattaatattaaaccatgtgatgtttactgtgggttttttatattgccaaattttccctaatcttaatttaccaataatttttattatgaatttggttttgaatttttatcaagtctacatctactgagggaattgttttcctccttaatctgttttctatttatgtggtgaattccactgttaaatttcctaacacagtagttctcaaacttgactgcacactggaatcacttggggagctttaaaaatactgatgcctgcctcctaccccacaagatcctaattcaagtggtctggggtgcagcatgggcttttgaccttttataagctctgaatrattccaatatgcagctgagtttgagaaccactgttcctagttaagccattcataggttcgtggacatgatttttttaaagctacatttgtgrtttggatcatgaattattattattattatttttaagacaggttctggctctgttgcccaggctggagtacagtgatgcgatcttggctcactgcaacctccaactcccaggctcaagtgatcctcccacctcagcctcccgagtagctgggaccatgggcacatgccaccacacccagctaattttttgggtgtttttttttttttttgagacagagtctcactctgtcacccagactggagtgcagtggcacaatctcagctcactacagcttcaagctcccaggctcaagtgattctcccacctcagctaccccccagttagctgagactacatgcacatgcccaccatgcctggctaaattttgtatttttttgtagagacagtgttttaccatattgcccagtctggtcttgaactcctgagctcgagcaatcctcctgccatgggctcccaaagtactaggattataagcataagccaccttgcccagccatgaattttttttaaaggacttttgcatccatgttcataatagattggccactaattttctattctattcttgagtctgttttagtagtttatctagaaaattgtccttttttctgttttcaaatacataatatttttacaasgtcacgtagctagtaggaggctgtaagcctggtgagtttttgcttttatttaataacttgcttttttctaaacaggtgatctgtgtccacgatgtctcatccatctaccgagtccccttgttgttagaggagcaaggggttgtagattattttcttcgaagacttgaccttcctattgagaggcagccaagaaaaatgctgatgaaatggaaagagatggctgacaggtttgcctgcaatgaggagctgggagtgctagcctcctttactcttttgtagggctggtgaagccgactctagccctagcacttttgtacttttgcacttctgccatccactcattagaagagcctttgtagtaagagatgttcagaaaggatcttagctgtcacgtagctgtggcacagatgaggagatcctgatagggccaggccaggtgccgggcctccagacaatgagttcgggttatgtcttaacacgcttgtctcttaccaactagatcagtgcagatgggcgtcytggtggcagcgggtgagtgtgcatatccaaagcccacacgaatggctgacagtggctggagcactcctgggtaccactccagagttctgagctgtgtttgggaatgtgtctcaccccacaccagaaagggatcacattaggacggggatgtgttgctgcctactccactacatccttttaaggctcggtgatgctgtcacattccttcagaaatcttcacttcgtgtcttagagcaatgggcaggccttatcttagttgcaagatcaatatgatggcctagaagcatttggagagggcatactcattccgttgctctgtgagaatcatttttcatttcaacattttcctttcagtctttgtctgcttacatatagctatcagaatggcagttttatcatcctttttcataaaacattataagcattttgctctgttattatattttacaatgaaaacttttaatgagtgtggacttttctattttgtgaatgtcccataatttgtttgacacttgccttcaccccattaattcttgtgaattgtctatgtctgttattttttttggtctttggtatgaaaaaaattttttgtaggcaaatttgtgtgagacgttgaaactctttgtaagtttcaaaacaaaaacaaaaaaaaaatttttctttacaaagcctgccatgttgatctgaaaattacttcctctttactggtctgtacacagaactcagataatagctattcccgttatattcttcccaggtgtgtttttgttgttttttgtgggggttttttgaggcagggtctcacactgttgcccaggctgtagtgcagtggtgcagtcagctcactgtaacctccaactcctgggctcaagatccccccgcctcagcctttcaaagtgctgggattataggattatgggcgtgagctcatcctggccagacgtggtttttttycccttgaaatagctattttggtctcatgatagcgtgtaccttctgagtaattgggtttttcttgacgtttatttgatagatatgatcgcttgctggagacctgctctattgcccttgtgggcaaatacacgaagttctcagactcctatgcctctgtcattaaggctctggagcattctgcactggccatcaaccacaaattggaaatcaaggtaaggagggtggcacaggtacagccaaaggatgagcagggaagcagtctgtagtctcgtaggtgctgtgtcatatctgctttctgtttggagctcagaattactttttaaggaattactttttaaggattaaaaagatttgtggttgcttcgtggctttgagaagacagtagagcattttcaggaattaatgaaggggagagatggctagaggagagggtgagagagacttgagttcttggctatgactatcaggtaaccaaataaaatgccctgtggaaatggggaccactgatggaccacaggcatgctgcacagttgatagctggaggctcttggagactttgttggcatgtgggctgcctttcctaacctgtgcttatcacttattgcagagtgggaatgacagtattgacctcacggagctgtgaggtttctctgggatgcagggcaggcactcagtaaatggtagttactgtgttctggtctgtgccatggcgggcagcagctgagctggtggaatggtggggcatggccctgcttgtctgtgggtggcagtagagtgtcatggttaagakcatggatgccgtggctaggcgcgttggctcatgcctgtaatcccagcactttgggaggccgaggtgggcagatcacgaggtcaggagattgagaccgttctggctaacacggtgaaaccctgtctctacttacaatacaaaacattagccaggcatggtggcatgtgcctgtagtcctagctacttgggaggctgaggcaggagaattgcttgaacctgggaggtggaggttgcagtgagccgagattgcacctctgcactccagcctgggcaacagagtgagactctgtctaaaaaaaaaaaaaaaaaaaaaaaacatggatgcctgagcccggtgaccagggctcagattctagctctgtcatctacaagcggtgagacctagacaacttacttaaccctctttgtgcctcagtttccacattgttaaaaagggatggtgatggtgccttcctcctagggttgttgtaagaagttcatgaatacaaagtgctgagaattatgcctggcatatggtaagcactatgtcagctgtcgttaaaccctcccttctgcctgtcccctttattccttttcttcctggcccatcagctgaagcttttcaggaagagatgaaggtcagaggtaaagttggggctcagtgctgaggttgttaaacrggccccatgtagctgtcmccacattggggtttgctttctacttcccaggtgtttctcagcgtgagagtttagtttgctttgtgctgctggacaggttcctgcagaatggcctgttgtacgagttttaagaatttaaatcccattacacagccctgacttcttatttgctagttctttccatcattcatttattttatccacttggagttagtctgtggctgccatgtgtttgtcaggtggcagaggatgagagatggatgaaaaggcaacggtctccgcctttaaggaatattgagtctcttaggaaggaaggagcacataggagaggctgaacctgctgtggcagacacatgaggaaggcagacttcctcatggagggacaccaggttgggttgggtaggatggagaaggctcggaaggggcattcctgttagaatagatagagcacgtccaagggcttggagatgtggagcagttggaaacactgtggatggaaattgtgaattggaggctgtctggagacaggctggtgagggcctgcccacaattccatgaactgggccaaatctgggtcttaccctgaggttcaggaaactaactgcagggtttaggtaggagattgtagaaaagtggtgaacaccctaatttaaaaagtgggcacgagatttgaacagacacttccaaaaaaagatgtaggtgataaacacgaaaaggtgctcaacacctctagttagggaaatcagtgcasatgaagtcacaatgagatagtgacacaaaccccctagagcggctgagtgttagagaggctgtggagctcttaccttgctgccgggagtgtaaaatggcaccaccacactagaaaacagtctggtagtttcttatcaaggtagagacgtgtgatccaataagtccattcccagatactcacttgagagacttgaaaacgtccacaaaaaaagatttttattcaaatggacaaattattcgtaatagctgaaatctcgaaacaacccaaatatttatagcctgtcaatggatcaatttgtaatggtttatttatatagtagaaaccactcagcaatgaaaaggaagaaaccaggctgaacactgactggctcaagcccataatcccaacacttagggaggctctgctgtgggaggatcgcctaagaccagtagttcgagagcagcctggtcaacatagcgagacccccgtctctgcaaaaaaaagttaaaaaagaaaaggaacaaacaactgataaacacagcaacatggatgaacttcaaaaacactaagcaaaagaagccagacacaaaaggttatatactatttggctccatttatatgatgttctataagaggcaaaacgaatctgtgatgatagaaattggatctgaggttgtttggggtaggaggtagaggggcacattctgggaagatggtaacttatgttttgttttgttttgttttgttttgttttgttttgtttgagatggagtctcgctctgtcacccaggctggagtgcagtggcatgatcccagttcactgcaacctctgccttccaggttcaagcagttctcctgcctcagcctcttgggtagctgggactacaggtgcatgccaccacacccagctattttttttttttttttgtatttttagtagagatggggtttcaccatgtttgccaggctagtctcgaactcctgacctcaagtgatccacccgcctcggccttccaaagtgctgggattataggtgtgagccaccacgcccrgctcattctatatcttggtgtgtatgtttgacaaaactcttcaaagtatgcacttaaaatgcttgtattttattgtatgtgaattatgcttcaatatggtagaaagaaaaagaaaaaacccacaaaagctgggcggaagatgggctgaggaggctgtcattgaacagaaagccctctagagtctgctgcagaggcttagctgagacccgatcctgaacacagtagagtgcagaaagagagagatttgggartttaatgattttgaaggaaactgttgtattttaaaacctcatatttaaaaaatgtttaagttattaaatatattaagwtgatcactttaaagccagtattaagatgatcactttaaagccagaatcaagaaagacaactttgataaaatgataatattatttaaaaattaagaacgcacagcctggggtcacgagcctgcttttctcccctgtctgaataacatccagtacatagattctgcggacttggagcccatcacctcgcaagaagagcccgtgcgctaccacgaagcttggcagaagctctgtagtgctcagtgagtagagttcrctgccttgggtttccagagttcttttggtttgttttaatgaaaaagtcctcttgttttcatgtgccagtagtaggtaattgacttgttaaaatattttttaattgttgaaaagactacatgccatctgatttaatccttaaaaaatgcagcttgtcaatatcattggatctgaaaagctgctctgattttgatattgtttgccatatgcatctattgatgaggctcatttaaggatttttcatccagaacatttgatgagtacccatcagtagagtctcatcagttgttttggcagctgttatttataatagtaaaacattagcaagaatttctggttcactagaacagttgaatattacggaggtgtacaccttcttctgagtgtcttggtcagtacggcacacagagctgatgaagaaaggcccccttaggggagcattttaagccaagaggtaagataaattgttaatattaatatatgtatttaaaattttgggctgggcacagtggctcatgcctgtaatcctaaaactttgagaggctgaggtgggaggattgcttgagcccaagagttcaagaccagcccaggcaacatagggagaccctgtttctacaacaaaaacaacaaaaccagctgggtgtggtcccagctccttgggagatcaaggctgcagtgagctgtgatcacaccactgcactccagcctgggtaacagtgtgagaccctgtctcaagaaaaaaaaattgtgaacaactcagtaccaaagatagtgcagtggcagtattacaattatgtatactatctttttcacttgcaataagcatgttcttaagttactaagaaaagtccatagtttcatatgcagtttctaagttgatagtgtttacatacaattcattgtcacagtagcacaatgtatggggttaattcatggcttcagtgtcttggtaatggcccgttaggcgattattgcaagttggactggtagaaaaggggaattgcctttgtggtttgttcttttgtgcagtggagtgctggttccaggaggatttggtgttcgaggaacagaaggaaaaatccaagcaattgcctgggctcggaatcagaaaaagccttttttgggtaaggagctctgcagtgcagtcttcacttaagagtaggaaagagtggggaacggtgccacgtgggagcctatgaacaaagtggggggattactgaaacatgctgtctttgtggataggagctcaagtagaagccttcatgttttctctttagagacaaattcagtcttggaaagcttatttatgcttatgagctacatgtagatgtcrtggaattttgagagaatgaattgtgaattcctgtccatttaatgaacccagctgtttgtagcacacgtgaggttgagttttatatctgctcacttggcacaacagctgactgtaattggacaaaatgattttgcatgcctcctggtgctgtacattttagtaattttcaacttgaacaattataaataaaaacttaatgagagagggtaagaaaacttgaattttaaagtactgaggctaggcacggtggttcacacctgtaaacccaacacttgtggaggctgaggcaggagggttgctggatcccagaaatttgaggctgtagtgagccaagatctctccactgcactccagagtgggcaacagcaagaccctgtctggggggaaaaaagtactgaatagaatatcacttacttctaaaatcggataactttgcaaatctagaattttcatctactttacatgcagtttttgaaatctaatacaagtaaagtgtaacagcagagagtacttgttcatagcaggaagttatgagtttgcaattataattctccaaataaaggacacaaaggccattgcagaggctgctgggaaaagtaggagctgccttttcaatggagttttgtttgttttttccccccgactggaaggcgtgtgcttagggatgcagttggcagtggttgaattctcaagaaacgtgctgggatggcaaggtaagcgtgcattaagacactcattcaattcccgcttgtgtatttctggaggatatgaggcctgttgccgcctgggtgatcaggagctttggagaagggcaggcctgggttcctagcacctcatggtgtgccgtaagggagctgccttgcctcttgaggaacagcacggctcctccatgcaggaaggagggagcrcagccagactccctcctttgccttctgcctctgtgttcctgttcttgagattctgtcactttgatcaccgtggccaccatcctgaagctggtgcctggtgtgaagtccttgtcctaagtgaggcttgggcagttattatgagaacctgggctctggagctattgaaactgggctcagattccaaccttaccgcttatgggtgattttaagcaatttacttagcctttatgggcctccgttttttctgtaaaatgggagtaataaaggtacgtacttcacatgattaagggagayaatgtatgtaaatagtctctagtagtgcctggaaaatagggaaatgctcagataatatcagctcttygcctagctgtgtattactatgtgacagacctccctaaagctcagtggctcccaacagcagtgacttctcatctcagtattctgtggtttggctcagtgcctgggtttcagctgcacgtggtgtactatctgagatggcacactcctgccttgtgttcagctgtgagctcggcccagccgggacgtcaagatgctgtctccacctagtggctcatcattcattaatccagcccaagcttcctcacacagggtgggcagctggmctccaaaatgacaggcctgttatgcaggcacttatcaggcctgctgatgtcccgttggccaaaacaagtcacgtggccaagccccgagccggcaggggaggagaacacacatgggtgtgaagactgagcatgctgcactggggccaccctggaatggtccaccacagcccatttattctctgtagcccacccgacaaatactagattttcagaaagaccttgtaaattctgtggaaaataaagtaacctgaaggaatgtaaaagcagtttgactttataaagaacaagtgactctggtggccagcatatggtttagggctgggtttcattcaccctttccctgagaggctgcttcacagtgacctggcggtgtggcttagtttggtagacagcatgcccttgagtgctggcttctgagtcctgagaggcactgtcttatcacccrccaccccagagctggctttctggtctccctggatccttcacagccccagacctctgcctctcacttaggttcccaaatgggtaggtgctttggtgatgagcttacacttcagttgagactggaccctggttcaggccaggaggagaacagtgcccagcgttcacatagtaccaggaacttggtcctttgccttttggtctttagtggttttgctttggttagacggtaagttcaatgaaggttagaaaggttgagttgaaatcagttcatttctgactgagctattgagtgaaacagttgagtagggctttgtattagctgctgaagatgaaagaagtatagaagaaatagtacttgtttatctcagagagacaagagtctgaaacattaagacaatataaaaacttggctgggcatggtggttcaggcctgtaatcccagcactttgggaggctgagttgggttaatcacttgaggccaggaggtcgagaccagcctggccaacatggaaaaaccccatctctactaaaaatacaaaaaataaccaggtgtggtggtgtgcgcctgtaatcccagctacttgggaggccaagacatgagaatcacttgaattctggaggtgtaggttgcagtgagccaagattgtgccactgcactccattctgggtgacatagtgagactcttgtcttaaaacacaaacaaacaatataagaactgtcacaggcggggcgcagtggctcacgcctgtaatcccagcactttgggaggccgaggcaggcagatcacctgaggtcaggagttcgagaccagcctgaccaacatggagaaaccccgtctctactaaaaatacaaagttagctgggcatggtggtgyatacctgtaatcccagctactcgggaggctgagacaggagaatcgcttgagacctggaggtggaggttttggtgccgagatcacgccattgcactccagcctgcccacacttgttgcccacaagtgtgaaattctgtctcaaaaaaaaaaaactgtcaaagatacagtatctaattaaaaattactaggttatgccattagttttgattttcccattttgtactgattgactttccagagagttatacttaacgtaaaaaaattcacgtgtgtgtgggttgagtattttatgtcttaaaaatgctatttattgccggtctggtggcttgcacctgtaatcccagtactttgggatgccaaagcaggaggattgcttgagcccaggtgtttgagactagcctggcaatatagcctttgtctctccaaaaaatgaaaaaaaattagctggatgtggtagtgtgcccctgtagtttgaccttcttgggaggctgaggctggcggattgcttgaacctgggagttcaaggctgcagtgagctatgatcgcaccactgcactccagcctggacaacagtgagatctcgtctggggatgaggtcagggggatgctatctttagtttttgttctaatcactgatcttaaactgaggagggaagttgtgtttagagcttagcaatgaaactattaatcactttcgtttgtaactattttcrtaacaagtattttggtatttcagatgccaattctacagagtttgaccctacgaccagtcatcccgtggtgagtcaagtgtttgaacctccacagggcttagaagggtgtagaaggggcatttatgaacgtgattgatgattagagacaagaagtgagactgcttgagtccatcccaaagaaccctgaggttttgggcactcagacctaccagagaggaaaaacttttctttttcattatgtaattcctccctaatctttcattgaccacagaaagtttttaagacaggtaccagcccaggaaactggaggggattcctgattaaaattcttctccatccctactcccctcaactcccagaacacagtatagatactaatatgagaccctggcatgtgtacttactgtgtgccagccgctgctctcactgctttcatatgtatattttatattarttcatgggatccccagccatagtcctgggagaactgctgggttggagcactggttggcttaaccgtatccaaagattttccaggctggcgtaccttgcgttagatttcatgccgagggcatgtggcattctcagcccgctgtactgttaggcacatggaggagggacgatgcctttaatcacctttgaattcccagcccagggtgacagggatgtaaagggaagggcacttatttacgtttttcagcagtcagcaaatgtgaatgcgtactatatgctgggactgcccttgtcactgaggacaccgtgctaaatgagacggacaaagttcttgatctcacggcacttagacagcatcactgtgtttgttgacctgaaattgaactttgctgatactaaggcctcaggagtggaccagcaaatgttttgcagcatggggctttggggtcaggaggaacagggcacagagagcctggaatcagaaggtgcctgggaacgctgggctgagaggtggactgggccatcagtgcatggcccacccagtcctcagatgcttgctaagctgcagggtgctagccctgcatcccttgcctttgagcagtcatcaggctagctggggcgatgacagacatgttatgacacatccagtccgtgtctgtgctactgtatcagtctttctaaggaagtgatgcttaccgtccacagtgctggggcgggactagcctgaggaggggctgctgtggtcctgtctgcagatcaggaggacaggctgaaggacggagcctccacccaaccgaggttacaaatgccaactgggaggcattttcttctgtgacaaaatgtctcataaggaaagcctggagaattagagcttacttacaagcctttgccacccactcagcgagggaggtttctctctagcggaagcagagttctgtagttggtgtctgttttctgaacatctccaggtcgtagacatgccagaacacaacccagggcagatgggcggaaccatgaggctgggcaagaggagaaccctgttccagaccaagaactcagtcatgagtaagagctgcctcacgctggcccagcctttggctctgcgtgcccaggacgcgtgtcttagggtgrtgctgtggcttcgaggagcaggctggctttttttggtttcgttcttgcttttgaagttcattctttcctctcttattcatacccttttaggatgcactgtgatagccatagaagcagtgtgggtcttagaaaggacactggcagtgcagtcagactcctaggcatgggcgcctcaacagaatgaggcagtgaggttacattcatccttatcggttactttcctattaagaccagccatatcaattgctgatgtttggcaatttttgtcacacaaagatggcaatttcatatgattcagcctaagtagattctgttctaataaagtactaatagatgctgaaggtttagggtagttttcggaggaaaatagttaagaaaatgactattacacagatttccttcttgtctactgggaaaattctgcctttactgtattagcagaggcacccttgtgtctgtctgggcgttctgtagcagcatagctggagtcacttgagtatcggatctttctcttaccaactctgatgttctgtggatttggggatctcgaggcaactgtgaaatgagtcagtagagcagcccgttcgcaaatgtccagcttgttcacatgcagccactgagggctgatgacctttgatgaccatgattggaactgaatgatcatcagaggtcatctgtgcagctcttaaaatgcctcccatcctgccacgttcccagggccttgccgtttcgtacatcctgatttgctttccaaggcagttttctagcagcaaagtgcccatactttgcaatcatgtgtttgagggtggtggtgagagtcttgtttctgttacagctttctgtagtgttgtcagaaagagtcaaaagcccaagaattagtctaaactgtgttgttaagagcaggtgaccttagcagattcatagaaatagccctcaaaagacctggctgtgtggatgatgaaaagtaaagcaggaaggaggatgtctttgtgaacgcatcaycctgtgagataaagttctttacatacagcccgtttgttttgccagggaaactctatggagacgcagactacttggaagagaggcaccgccaccgatttgaggtgaggattccagsttgctggtactctggaaagatagtgagctgagagaccagcagaattatttttcatgcctcaacaggtgaatccagtctggaaaaagtgtttggaagaacaaggcttgaagtttgtyggccaagatgttgaaggagagagaatggaaattgtggagttagaaggtgattattcgggcagttttatttaatggaaaacttagtaaagttttcttggcatatgggaaaatataaaaatgttatcttgttgctcctgacctaacagaattaggaagcagcactgtctcatgagggaaggggtcttgataaacatggggtcyggactctagraacttctttctggtacatggccttcctcggggagccatttaacttctggccgcagtttctccttctccaaaatgcttggagttggtactaaagccacttcagccctctcctgaaccgcaagactcagtctacagaaatcctgggagccagggtcttgggcgggaccctggacaggaggccttcagccaggaggggacagcacaaaccgtgctgagaaagggtatcagatcactcatgctttgaggttccctttatctagattcaaatgagaaagtcattttcaaattattttagggcctatggaaacaaacatttaagcagattttgttcttttacactttgtgcataaccttcacartgaagctgtttcttttgaatctctatttcagatcatcccttttttgttggggttcagtaccaccctgagttcctgtccaggcctatcaagccctccccaccatactttggcctcctcctggcctctgtggggcggctctcacattacctccagaaaggctgcaggctctcacccaggtaggcgcactctttgcttcagtaatccattagtcttctctagtcctttaggtggtcgctgattcattacagcaacacgtcacagtcagtcataagaaaaaaaagccacaggcgcctggggtgaaagtttcctctcctttcccggagctttctcacggtgtttccctggcatattggccaggtccccctttctgcagcatctgagctctggtggtgctgaccagatcacacttggcgtaggaccctctggtccatgttaaggggaactagtttttcctgggaagtaagccacaatgggtaggtttatgtcccattgccacctttatccagaaccagtactcagagttggtggtagggtgtgtgactgaagtataaatggaatgtatatcttttgtagctagaagaaggaaatctttctgcagtttcatgttaaatatattatgtagcaaacagtctttgtgattcctgccatgtgcaggcaagtgtccctgtaggaaccgtggttacaaaaacagggacgtaaagtgagtttttggtgggagatgatgcgtaaaccatctgaattctacagggacacctatagtgacaggagtggaagcagctcccctgactctgaaatcaccgaactgaagtttccatcaataaatcatgactgatcttgtagcgtaagtggtactttaaagttttagtttttaaaaacatggtgataacacactgcgattgcaagaatatcatggaagtttagggctgaaaatttttatctgccaggaatgaaagtggtgaggtcttgaatataatccagaggttgagagagaaaagaaagtagtgaggtcattgtgggtatcaaatgggcagyccttyctccaagttgcagtgcacctcccagtcctgccctggggatgacagcttggggagcatggtcactgggcagttgtctcaatactgattactacattctggtgccagtctgaccagttctggggcggggaaggggagggtctgaattcttagaccctattgtttgatgtagctgtaaattttggagatcttgaaggaagggacagatacaacaatgtggcacttgtcatttctgcagagcctcaggttttcatcaggaagtactttaaaactgacactgcttagagaacttttttttgttgattgctgcttattctggaattccttcaaagttggaacaattgccaaatagacgtcgaatgtttgtctattaagtgacagggtttgtaggttcataaagtgcaataactgtgggcactgccacgaaatgtaaatgtcctttgagataactgtgtggactgtgttggcagaagtacgcattctgctggtgaggtatcaaatgagggagtgtcagtcatctggggtctggaataagaaccaggggtatgggtgtgtggttccaccgctcctgccctaaggcctgggcagggggacctccctgaatcctgcacaccgtgtgttcatcaccagtgggcctctggtgctgggtcagtgccggtctgacctgctgatcccagctgtttcccctcctgccttggttggttgaccccctgtcctggcatagcctaagtaggtggtgggtaggcatgagaagttagtatcaggaggagggcctgtgtgctaggtaagcgtttaacacggatggactcattaatcccctgaccagggagtttgctataggctgtttcacagtcttaaggagctgatacaacaagaactgttaccagtgaaggaggtagatatttggtcagttacatggaatttctgactgcctcgcaagtggagaattgcccgttagtgacactgttacgaggtgctgtggagaaagaatgcttgcattgggtggttgtagaagtcgatgtgtgaggtcttgaaaaggtctgattctgtaggaattataaatttagcgtctaattattcccagtaggctccttctactgctctgccatgaaaaacaggcttagtttcccatggcagctgactagaaattctaacttttctactttaatgtacatcatataattcccacttttttttttcttttaaacagggatgattcttcaagagacccttcaaacttgggtagagtttacagctctgactttacactcggctttggagactttctttaaattatgtttttattaagattattttattatgcggaaaggtatttgggaaacttgtcacttgcatgtcccatcacgtgtactggctcctctgtggtgtctgcctgttgcgtgacactctccttgcagttcttgagttgcggcagaacatcgcgatgggaaccgatggtgggtggggctgcagagtgccccatcggtcaccttgtttctcaactacctcgcatcattgcagatgctagcgcgttgcctgtcgctttcccttggatacctagaccgttataaagtgtgccacatggacttaccgagcatggagagaggattttagctaggatttgaacacttggtgctgggaacctcagggtattgcttgccactaagccatgaaaccagagacaaaatctctatactgccctgagttggggggaattctcagtgccaactgtggctggtcctcattcaaagggacggtcagtttggtgtcaacatgaaacaccaagatgtctgtctctgaagcgtgattttaaaatccccatgcctgtggctgcgcttcctatttctagggctgggaaacactccttgcatcaaggggtcacttacagaacaaagaatcttttgggggaaacttcctctaaaaccctctcatatatagacagctttgactggagggtccatttttcttccaggatggtgttactgcagttgaaagggcaatatgaagttactttcttaatgtgacctagcaataggcatagctacgtggcactatattctggccagactcgatgtgtactctaacttaagaaataaatcagtaaggcagaacaagagacatgctttgcttctcattctctttatgtcattggccagatgggaagcgtctgagcacgttgctggcttgcttgtgtgcagtcagctgaattgtcagtgccgggtgctcctgcaggtgagcagccttgactcagcagacaacctgagagtttgtttaaaaactaagaaatgaggctttctttttaataggaaccagaatttttcataaagcttcaaatacaggttctcagcatgtagagcgagatgaaaaggtgcatgggtgctattatggtgctatttatgactgagaaaggggagggataagcatgatttaggaaggtggtcctttcctctgccaggcactggacgtgggtaccccatatacacagccagtgagcagtgggccagactgtcttcaccagcagaactgcttgttatggtactttgaacgtggctgattgagcataattctaacctcttctcccacctggtggtaccaggagattgtcttcattttaaattttatttatttatttatttatttttttgagtcagggtctcactctgttgcccaggctggagtgcagtggcacaagcacggcttgctgcagacctcctgggctcataagatcctcccacctcagccttccaagtagctgggactacaggttcacatcaccacgcccagctaattaaattttttttttttttaatagacagggtctcgctgtgttggccaggctggtcttgaacgcctggcctcaggcgatcctcccatagtgcagggattataggcatgagccattgcacctggtcaatagtcttttttttgagatggagtctcacactgttgcctgggctggagtacagtggcgtgatcttggctcactgccacctccacctcgcaggttcaagtgattctgtttgcctcaccttcccaagtagctgggattacaggtgcctgccaccacgcccatctaattgttttgtatttttagtagagatggggtttcactatgttggctaggctggccgtgatctgctcatctcagcgtcccaaagtgctgggattacaggcgtgagccaccacgtctggcccgttttttttcaaacattccccaaactgagggtctgacacgcccgttgttgacatcatggtcccccacaatggctgggtgtgtgggtggtgtgaaaaagcctcccagtaattaagttcctgcccctatgtttaagatcactttggctgatcacttgtcaagtgctggccacataatgtaaggtttctgaaaaaagagatcccagatggctctccagagcttgcaaagctcgagcagccccgccacgctggctgtggcagacaggatagggctgaagctggatttacaggagggcaacctgtgcccagtgtttactgacccgtccccggaggcttctccctcatggggaggaaagctggtcacattcctcgttcctttcttaatgtgacctaacaataggcacagctatgtgtaacttcccttcagtaacttccttcagtccagggaacttcccttcagtccaggggatctgggcagttcttagcagtctggagcagctgggctgaagcctgacttcacccttcctttgtagaaatctgctcttttcccccsaaaaacatttccgaggattgtggtgcctggactagcatttagcatggtacctggaccgtggaaggtgctcagaaatgccactcctccttcttgagtaacacatttgtgtagttttcaaacagtcttggtgaccttggggcagctcggggggtgagcagcaggagtttggtaacctgccaccatataggtgtctgtgatcacattggtccctaaccagcatgaatggcagccgaggcaggggttgtgtgctctttgctaagtgggaaaaccaggtctcagagcagttgtgatcacccagaaaatgtcacctggctggtgagtggaggggctgggggttccaaagttctcatctgtgtctgctgtggatgtggccagggtcttcaagttttaggggatcaactgaagtgtgttctgtggaacactagtcctgtgaaatgccctgttcaacaaggtttggtgattttctggtggctcagaccccaaatttaggagtatccttaattgtctcaccagcaggtatttattgggtgtctaccatatgccagccatacccaaacccctgtcccccagagcagttattcagtgggggaagcaccaaatataagctacagagtgtggtagttcatagatggagaccaagggtggaagtgagcaggggagtggcagtgctgggaggtggtgtctttaaaatagggtgggtgggaaattaagcatggacttgaaggtgaagaggaaaggaaataggccgctatgtagcgcagaggccccgaggcaggagtgcaaatgaaacaagttggtgggcgtggctgaagtggcttacataaggggcggaagacattgaggttgggtgggctaggtggtggagaaccatgtaggccatcaagtttgggctttgctcttgaagaatttggagggctatgggtgcaggtgcggcatgagtgtgatcagactctggctttgcagcctctggctcagctggtggagacagcaggagaaacggccagaggcaggaagcagctggaggagtctggttttttttgtttgttttaagctaacggtcttactggaccagaggggtcttggaaaggaactgagacccttagtgtgaggtgctgctctgtgccacagctggcgtagacacagggcactggcccgatggtgacaaaatgcccctggccattgtcactgtcttatagatgaagaaactgaagcacagaggcatagcactttgccccacggtccctggtctttaagacagagctggactggagtctgaggggctgggctccctgcccttgcaggtctgtcctctgcctcctggacagaggtgggctgggcctgggactcatgaccctgcagcatctgaccggctgacccagtgtcctagaaagaaccattcttgtcccaggtgcatgtaatttattaatggagctttgacagtcacaagttccagcaagtcaggggtgggggctgcagggtggcctcttgccctgtaaccacagtcatcaaatatgcctcgccatctttgaggggctttcctgagatgacagattcctttctggcactgtgtagccaactggagtcacagacctcagcctgggccaaatgagcattttagggagaaggacaatcccttatagcttagccctaggggagctctgggcagggttttacacattctttctgaaagtaaggtcatttggggacagggctgagagcagtttcttggctacacagatgggtctgtcagggttgaagccacatgggtgcctgctcatgtgccatgttgaaggagtccctgtccgcctctcagcagcccgcatgggctttactggttggccttacactcaaacaggaaatccctgggtctcaggtggagagtgccgtgccgtcctgcctgctccccagggccctcacaggacacagcaggtgcaggacacaggcccgtgctgctgcagctgctgctggagctgctccttctccatcatcagcgccttcatcttctcttccagcttgcccagctccaccagccacctctgaggggacatgggaaaagcatgtggccaagcccgcctggtctcgggcctgtccgtcctccacctggggccaaactgagggaggaaggcaaagcccaggagcctgagagctttctcagctaggggaaaagtcaggcccctcggcctgctgccaccttcaaccgtgtcagcctgagggaagctgccggctgccagccatggaagggagcctcctccgtgctgggcaggccatgtgcctcctcactgttggtcccttgtcctccattctctgtttccctcttgaaaaagctcttccttgggactgtgtcttgccccctctgccgctttagggcctcccctaaaatgcagtgtatagtctttggggttttctggtgacatctcaacattccagtctctctgctccctcactcaagatcgagtgtgttaactgcccaagtagagggtgaggggtttcaggcacccctgaagggaggatactgcataggatttttttttttttgagatggagtctcggtctgtcgcccaggctggagtgcagtggcgcgatctcggctcactgcaacctccgcttcccagattcgatcgattctcctgcctcaccctctcgagtatttggaactacaggcgcccgccaccatgcccagctaatttttgtatttttagtagagacgagggttcaccatgttggccaggctggtctcgaactcctgaccttgtgatctgttcgcctcatcctcccaaagtgctgggattacaggcgtgagccactgcgcctggccactgcatagatttttaaaaggagagagcttgggcctcttccttcccaccagccacctacccgcggagtatgggatgtggtgtgattgtattccaaccccttgggttcaacggggtgatgcaggacccagggaaccatggtggcttgccctgggctgctcagtgggtggctgaaggggtctggggtcagctccgctccaccccacccactggcctcagcttccgtacctgcctgcaccactcctggatggcgctggcagacagcgggccctggatgctcccgtcgcgccgcagaaacacctccccctggtctgtctggtagagttgcggctggctctgggccttgggggtgtgcacggtcaggcggatcaccttggtaggggcaacagcagctctggaggcgccgcccctcacggtcggcagcccccatcctgccaggctgctcagcattgctcactgattccttagggcaggccagcagggctggcacaggggccatccccagcctcttctcctgtggcccccagtcccgtccctgccccagcactgcctggcaggagtgcaggccatcgtcttactgagtgatgacagatgacaggcccagaggccctcctgtcctgcaggctcaccttgagggggacgctggtctccgaggtactgatcacagggatgaaggtgagagtgtaggcatcgggaaagatctgaggcttgaagccctgcaggatggagtccaccagcaggcgtgcgcggtcctcgtcacggtggctgcagcggatgccctgcaccaggccgctgtcctctactcccacgagcaggctgccgccctcgctgttgaggaaggcgcacacgtagcgccgcacgtggtgcttgaaggccaggctgaggtactcgccgctaccccgcttgaactccatattgcgggtctcgctgcccaggaaggcaccctggaagagctggtccttgcccacgatctgctggtgcacaatggcactgtcggagcacacgccgctgggccggccctggcagctctgcagctgctgggcctggggcctatcaggcagcgtgtgtgtaggccaggtgggcagcgggacaccagagcctggactggggccagggctcaggccactgtcctcctcctcctcctccttctcctagggtggtagtcaagaatgaatgtatgggtccagccaggaaatgggagccctgaccctgagaaggactgcaagaacccccagtcaggcccctgctgcagcctgactcttacggacatcctgatgcccctcaccaggccgaggggcccagttctgcccaccctcctgcagccgaggcaggaaaccctgctggatcgagggttccagtcagcgctcctttccctgccaagctgggcccttcccaggtgagctgtgggatgcctggtggggaagaagagatttctgcttctcagggctgggtgctgggacatgtgtgggcccattttttcttacttgggttgcagacaggcccctgaggcccagaaccagatcattccagcaggtatctcagcaccctgtgacagagctgcag

SEQ ID NO: 95100 - DNA, 45091 bp, Homo sapiens
  misc_feature (1)...(45091): n = A,T,C or G
caagtgacaaagattcctagcttggccaaacattagtcaggtttctttcttttctttctttctttctttctttttctttctttctttctttctttttctttctttctttctttctttcttttctttctttttctttctctctctctctgtctctctctttctttccttctgagatggagtctcactctgtcactcaggctggagtacaaggttgtgatcttggctcactgcaatctctgcctcccaggttcaagcaattctcctgcctcagcttcccgagtagctgggattacaggcatgcaccaccatgcctggctaatttttgtatttttgctagaaatggggtttcaccatgttggccagactggtctggaactcctgacttcagatgatccacccacctcggcctcccaaagtgctggtgttgtgagccactgcgcctggcccattagtcaggtttgtgaaacttctattaggtctacctgtgcacttccatgtaaaatctagttttagcaaagaactccccagtttcactgtgcaatcacccttgatatctgatcaggcacctcatcctccaccgcctcccaggggctgtctgatcaccctgacctgccttccgcaagaattctgtgaggtcggtttagccagaatccctctgacccctgatgtctcctcttagtcattttccatccactgaccccaccctgctccttggctataaatccccacttcctcaggctgtatttctggttgagcccaatctctctcctgcactacaagactctgttacagcagtttctaaccctattgagttggtcctgaataaagacttctttactatgctttaataagtatcatggatcatcaaatcatttatttatttatttattaccaccggcaacagaaaggtgcagtgtgacagcccacaggggcaaagggtgagtgtgctttaagggaggagagaagggtgtgggctggggagaggcccccagggaggtagggtagggctggatggtgtgtcagggatgggctgggaaagagtccttgtgccattctaggaaatttgggttttatccctcagacattggggaaccagcacaggattttaatgagaggagaggattgctttctcttttttccctttcttgcccccttttttccatcctttcttcttttcctcctccctcccccgccccaacccccgtctcactctgtagtccaggctggagtgcagtggtgtgattataacttgcggcagcctctacctcctgggctcaagcaatcctcctgccttagcctccagagcagggactactggcatgtgccaccacaccacaccttccttcttttcttccttcccaactccagcatcaggccttaggatgggcagggtgcagaagacagtgacagcagggagctgtttagaaattggcctcaggagcccagaacacaggtaatttgggccttagccaggcactggcaatggtgatgtctgtgaggcagagagctaattagggggcagaaatcatagactatactgaacaagtggattttgagagagaagggcagagttacagttccagatggtttgtatttattctaactcagagaactgggtacatgaaagagtayatagggggaggaggatcagatttaggggtcagataatcagtttgagtcaaaaggggcttagagtgctggtgaacatttaggtgaagatgtccagaggacaggtagaaattacgacaaaggtaagagctatcgatgctaaatgaagctgggggagaaactccttgatccagcaacaaacattttaaaagacagctggaaaaggagcacatggcaaagaggacagagaaggagaagacagaagaaacagagaaccaggtcagcatccgctgctggtgctgagaggaagaggagagtcagaattgaaaagggcatttctcattcccaagtcgttagttaccaagggacgatagatgggaggagcaaaaactgaggcagatccaggcctggagacacatggagagagttgtcttagaatactctttcaagaaacttatctgggatgaatgagaagacgaactggagctggaggtgggactgtgtcttttgagataggagccttggctgtgacccatacaatgtgtaaggagaggcatcacacctcttccacccctacaagttgatactctcatatttaaaatctgagttaaggccaggtgcggtggctcatgcctgtaatcccagcatttttggaggccgaggcaggcggatcacttgcagtcaggagtttgagaccagcctggtcaacatgatgaaaccctgtctccactaaaaatacaaaaaaaagttagccaggcatggtggtgtgtgcctgtaatcccagctactcaggaggctgaggcaggagaattgtttgaacctgggaggtagaggttgtagtgagccaagatcacaccactgcactccagcccaggtgacagagtgagactccgtttcaataaataataataattaattaattagccaggcgtggtggcaggcacctgtaatcccagctagttgggaggctgaggcaggagaatcgctttaacccrggaagctgaggttgcagtgagccaagattgcgccattgcattccagcctgggtgtcacagcgagactccatctcaaaaataaataaattaataaattaaaataaaatctgagttaaatttaaataattgtgttgttctggagattttttaaaaaatatcatcactggtcataagaatttgaggaatagctaaataacaaaacagaggtttctctctctgtctctcttcctttttccataacaagagaagctcatcttcttatctggtctggaatcacttgggtgacatttcaaaatgcaaattaagagccaggtgggcaggtccccaatgcgttgggatgggccgcagctgactgggcagcctcccttgagctcccaggactttgccgaagggagtggcgtccatttgcatgaggagctcaggaaaactgctcctcaggtgccgagttagagacacctagtgagcttcaccagagtagttttgaccagggatacaacaaagctcctaaaactgaaaaagcacgaaaacaaaaatggttgtgaacagggctcagcgatgacgaggctacattcagccagtgtgtgtctggtgccatggtagacacacccctgggatcctgccgccctggcacagggggtgctctgggagacagaggctggaattggactgcattgcagccaggtggccttggagacccagaagggtgcctccttgggcaaacttaatgttccccctaaagggatccctttgaagatccgcatggctttcacacaaagggcgtggggtttagttccaaaacgtaggcttgggtattatagaataaaagcaaaagagggcacaagatgtgcattttcattatgtttacttagtgaagggtgggcagacattttcattatttttgggttttttgtttgtttgtttttgagacagagtcttgctctgtagcccaggctggagtgcagtggcaagatcttagctcactgcaacctccgcctcctgggttcaagtgattctcctgtgtcagcctcctgagtagctgcgattacaggcacccatcaccacgcctggctaatttttgtatttttaatagagacggggtctcaccatgttggccaggctggtatcaaactcctgatctcaggtgatccacctgcctcagcctcccaaagtgctgggattacaggcatgagccaccgcgcccggcccattttcattatttttaaacaaaggcgagcaattcactttctgggtgcccacctgaagtagagaatcccaaccccttaccacgaaaacagataatctgttcactgagccccaaggacaaagcagccagggtcgactgaggggctactgcagccttcctctctgactcctcccacctaaccattccctcaatacctcaatacacacactcctttctttcccaagtctattgcctcttccaaaagcaatgtaagatccgccccagaacagtggggagttcttatcctttccgttacctaagcaacctgagggcaaagacctttagatcaccggcagtgctgttctttgggtaacttgatctttgcttatcagctttaataactttattatacgaaatacccagccttgatgaagtatcgatgactcactaactgtggtgtaactaattgtttcattcattctacaaacttttttttttttttttgagacagagtctcactctgttgcacaggctggagtgcagtggcgcgatctcagcttactgcaacttccacctcctaggtttgagcgattctcctgcctcagcctcctgagtagctgggattacaggcgcgtgccaccacacccggctattttttgtatttttagtagagacgaggtttcaccatgttggtcaagctggtctcaaactcctgacctcgtgatctgcccaccttggcctcacaaagtgctgggattacaggcatgagccaccgcgcctggcctcattctacaaacttttattctgcactcactataggctgggagctacactagggcctggggacatgaagacaggcgacacggtccctgggctcaagatgccagacagatgtgcaaacaagtgaaatctgatgtgatatgtgctttagtggtgccaaggataaaaggataagtgttaagaaaaagtagcaacaatatgtctgactgggagaatcaagaaaggtgtcatagagtccctaacacttgagctgagaatgagaaagagcatgagctggccaggtgacacacagagcatattccaacctaggagactgggaaatgggccaaaatatatacgtttgaggaaacaaatagcttactatataattaaatatgaggcagtttagactgggcccttatggataagtcacacccataaattttatttcatcttacaggcagtggagagcctctggaggattctgagcttcgtggtctcatcatcagagttatgtatggcaaccatcccaacctttttggcaccagggaggggttttgtggaaaactatttttccttggacagcagaggatggtttcgggatgattcaagcacatgacacttcttgtgcactttattttcagtgggagccctgagcttgttttcctgcaactatctggccccatgtgggggtgatgaagacaacggcagattatcaggcattagattctcataaggagcgcacatcctagatcccttatgtgtgcagttcacagtagggtttgtgctcctataagaatctaatgctgcctgatctgataggaggcagagctctggtggtaatgcaagcaatggggagcagctgcacatacagataaagcttcactagctcacccactggtggctcacctcttgctgtgtgtcctggttcctaacaggctacagaccagtcaggtctgtggcccgggggttgggaactcctggtgtatggaagagactactctgcagcaatgtggacaaataggatgagggtgagctgtcaggggagacaggcacacatggcagagctatttaaaaaggaggatagatgaccaggcacagtggctcatgccagtaatcccagcactttgggaggcagaggcaggcggatcacgaggtcagcagttcaagaccagcctggccaacatggcaaaacctcatctctgctaaaaatacaaaaattagctgggcgtggtgacatgcgcctgtaatcccagctactcaggaggctgaggcaggagaatcacttgaacccgggaggcaaagattgcagtgagccgagatcgtgccattgcactctagcctgggcaacacagcaagactctgactggaaaaaaaaaaaaaaaaaaaggaggatagacagggcttggggattggtggatgggtagataaggaaggaggagtctagcatgactctcagaytactgacttggaccagcaggggaatggctgtgacaataaataagattgggaaaacaagaaggtgagcaaatttagaggagaaaatgaatttcatttttggcatggtgtggaaggctcgggagagaggtctaggcaccagatgtcaacgtgaggtgaaatggatatagctgaagtcaagggtgtggtgaggttttgcagggagagcagggacctccagcaaggccagtgcataagggagaatagagaaaaaaagaaccagaaaaagacaaggagaggccagagaggtgtggaaagaaccagggaagacagttattcacaacaaacaaaagagggcagagttttagagaaggaactgagcagtttggggctccaggtggggcaggagtgggtggccacggttgaggggcagtggccttcaaattggtctgggtaggttctaatgggtcagattggtcagtcctttccaggacactgaaggctgcagaggtgtgactggatgctggtggagggatgcatggcggggaagctgagtcagatcctgaaatcctccaagcatgcgcctgaaatgaccaagggaaatgaaggcggaggctgctgtcgcctggtggcctgggaagggccaagagccagggagctggaggsaggagagaacgtgcgacctcagcacggagcactgtaggggaggcggggctggagggagatggcgccgcgctcccggatgaacagagaaagcgacagggtgagtcgcagggcacagtgtgggatgagtcaccgacagcaaggcatggactccgggaagaaggggagacgagccgggaaagacttgcatcggggatgtgagctgagctgcacccagacaaaagcggctcggggctcctgaaagcagcaggcaccgccggtcctgccaaggggctacttcctgcgcggagtaggagagtaggagaccccaggccagtcccaatccccggcccgtccgggatgaggggggctgcgggagctgcgggggcctcctccagggaggacggttgcagggtccctcggccgccgcccactcccgggggcgttccttcctcccagctgcgcccggagcgcctgctgcctggcgagagcccgcccctctgcaaccagcccgctgcagcggagggcgcctgggtgccctcggccgagccagcagcccacggtcggcgccgcactgtcccctggtggcggagcgctcccgcgacccggctcgccacgcctgggaggggtccaggaggacgcggctgggacctgggggctctcagggtggggccttgggggatgaggctggggcccgcgggaaaccgggctggggcgaggaggctcgcaggacttcctgccacagaatgtttcgatgctktttttaattctgcaaatgtaagcctttccactttaagtccaagctcagcgcagaggactgttctataatacatacaatttagtttaaaaatgttgcaaatgttaacatgtgtcacaaactcaagcaatccagtattatagaaagcaaagaatgaaatgtgctgcttctttctcccccagacgcccttgcatacattaagatatgtatatatggaaatgttaccgggagtcccggttatcccaaaaagggttgtttcctgttgcgtggtgaggccaatgcacgaaaccgaaagggagtgtgtcaagcagtgcaggctgtattcaatggctatggaattggaagatctgaaatcaacttagcttgtgagagctgggaagtttcagaggtagggtgtctttaatgaaggggctgggcattaagagcacgggggggaatattcgtgctttccttgggaaagaacggagatttttcccggaatcaagaaacccctttttttctgtcccttcttggtctcttccagtcgttgtcatggcgacatgttgtttagcatgagaacaggatgatgataaagccagaggctcttcagaggcgccatcttggatttcgccagcttcagctggtttcgtcctaagaaggaacttcgaaacacaggcattctttttcctgaaaataagcagagttacagctgagtaggaatttagctctgtcccayatgctatcgcattgggcagcaaaagcagggtggggtccagcgaaatcagcaggcactgcaatgagtaacatacccagcyacgtttatgcagcatttttacgaaaatgaaaccatactacctgtaaaggaagatatgctaacaaacaacaaaactggcaggaaccaagattcctactgacactacccttagttttaattttccctgacaacaaatgaggttaacagagcataattatctaccgtgaccccttcaaaaagacaggctgtatacatttgcactaagagaagaaatcgtgtaatgtcagcaaatttcccccacttaaarcttctctatttaaaaagcttcacgcacacatgcacgcatatgtcttcaagatgaccacaatttattttgcagtcattctttgcaccagttcccaatttttcccactagcttgcaagctccgtgactcgaggagaccgggggatcagagtttgtttttgcggagaagtgagtcctttatgccccaaatagtgactgacatagagaaggtactcagtaaacactttttaaaggaaygcctgcctgactgaagcttaatgatgtgaggcttctagtgkgataccctaccttgttttaacctgaagtgactcttccttagctaagagagccagacggactccatcgtgactccttcactcgcagcccctyacccacccccttcctcaaggacttaacttgtgcaagctgactcccagcacatcaagaatgcaattaactgataagatactgtggcaagctatatccgcagttcccaggaattcgcccggttaatagcacccagagcccctgcgtttgtgtccggttgataacgcccaaagcccggcgtccatcaccttaggatagacttaaagcctctgyacctggaactgtttactttcctgtaaccgyttatccttttaactttttgcctactttacttctgtaagattgtttcaactagactccccctctcccctgtctaaaccaaagtataaaagaaaatctagctccttcttcggggccaagagaatttygagcgctagctgtctctcggctgccggctaataaaggactcctgaattcgtctcagagtgtggcgtttctctgtaactcgctcggttacaacactaggttaatctttttcctttaactgtttgtttaaaatatattatgtttaagaccttctaactggtcagcctccaagatagtattgtgstgggcttgctttattctggtttggtttccatgatcccagttcatgtgttacctgcttctcttttgaattcacaatgatacacaacttttaatttgttagaacacaaacataaggaatttttttttccattttaatgtgagatatgacagaggcaaattgtttcttaaagacataaaataattaaaataattacataaattgtaataaaataattattacaatgttctatctttggcattaaggcatagaacaattttttaatcctaaactaggctgggcatggtggctcactcctgtaatcccagcactttgggaggctgaggctggtggatcacttgaggccaggagttggagaccagcctggccaacatgatgaaaccctgtctctactaaaaatacaataaaaaatttagccgggtgtgatggcgctcacctgtagtcccagctactcaggaagctgaggcaccagaatcgcttgaacccgggacgcggaggttgcagtgagctgagatatagcgccgctgctctccagcctgggcaacagaatgagaccctgtctcaaagtaaattaaataaataaaatcctaaactgtaggaccaagatttgatkcagaaaagagactttcttgtactaatttatacactgttcatgtcagatccaatctttctttttattagatgaatctggaaaagcaacttagaataattcaatcagtctaaaagaataacagctgatgagatgcagtcaataagcagttttgtattagtatttttataagaaattagaaaaacatgattttgggggagatcttctcatagttaacagcayatataacatataagttagaaatgtactctgctagctcataagatattttaaagcagggattttagtgtcattaaacttttatttataatagtttttttaatacaatttttttttttactttggaataactttagattcacaggaaagtcagataatacaggtagttaccatattcccctaacacagtttcccctaatggtaacatatcaccatggtagtgttgtgaattcttatgttgggttgcctccacatccattttgaatatacattggactttcccacaccaaaatcaaggctcagtcaccccggacaaagttgctggttctccaccttctcccagttctgttatgtggtggatccagatatctgcctcatacaactatctcctgttgaccacttctctatggcacagctagaacctattggccacactgaccctcacaccccacctagaatgtgcagatgcgccacagggcccaccactcagtcactgtgccacctcctggaactcatgcctgcttgctgtaaacccaccgaataaaactccccatgggaaacctgtttggataacaccctggacccaataaaggtgttggcccatgggttgctgtcttggtctctctgcctgcactccctgatttccatgaaggtggcctccaagtatgccatgtgccccaggatctgtaagtaataaactatttctagcctgtgtctctcctaatcgttgtaggggtgctccrcatcttgaagatcttaaagtaaaacagatacatttgtggaaactaaggtcccaacgttgtacattactattaactccaggcttcatttgggtttcagttttttcattaatatcagcctaagtttttaaaaaatagtcagccgaaaagaaggatttaattttatgtggtaatttctgcacaaacrtaatattcttgagaaacatcttgtctatcaataacatgtttaactatatrttatatcaatatgctcaagaaatcaggccttggtaaagatttttctttttttttttttttttgggacggagtctcgctctgtcgtccaggctggagtgcagtggcacgatctctgctcactgcaagctccgcctcccgggttcaggccattctcctgcctcagcctcccgaatagctgggactacaggcacctgcaaccacgcccggctaattttttgtatttttagtagagacagggtttcaccatgttagccaagatggtctcgatctcctgacctcgtgatccgcccgccttggcctcccaaagtgctgggattataggtgtgagccaccgtgcccggccccaagatttgtctttactaagtaatgcatgtgaaatataataactgacaatgataatacagtgaccaggtaactcaaaaattataagtcattcaattgaataacatagtgtttttgaaatgtaaaaagataaatataaataataagtcatattaagacaaaatttatttaactgataaaagtaaaatttgttattctctctagctgtatagataagacaggatctctatagtgcattatttcaagacttacttagtargaaaaccagtaggtttgatttttttttaaatgccactttggttttaaagcactcgctttgtccactagttttctagatctgagtattggctattaatgacatatttctaaattatacacatcaataatgtgacaatagcttcaggtcaggaactactgtgtgatttagatgtttgttccttccaaacctcatgttgaaatttgtttcatcttttttcttgttttcatagataagggcctcgctctgttacccaggctggagtgctgtggtgtgtttgtgactcaccgtagccttgaactcctgggctcaagcaatcctcccacctaagcctctggagtagctgggactacaggtgagcaccgccaagcctgacctcaagttgaaatgtgatcaccaatgttggagtggggcttaatgggtggtgtttaggttgcagggccagatccttatgaatagatgaatgccctccctcaggggtgagtgagttcttccagagctggtggttagaaacaatccttgacctccctcctttctctcttgcttactctcttgccatgtaatctctgcacactccagttctccttcaccttcctccatgagtagaggcagcctgaggccctcaccagatgcagatgcccaaccttgaactttccaaccattcagagtcattagccaaataaaccttttatctttataaattactcagcctcaggtattcctttatagcaacacaaaacagactaagacaggaacctacactccttagaagaaggccatatgatataagggtgttgagtctaagattttagtgtctacacttcgtcttacattttccattctttccattttcacaagtcctatgatacagttgaaaatctttcctacgcactagtaaagccataggaacttaaaattattaagtgtcaagcacatatgaaaatcagacaatgtgcaaagaaaaacgggctatgtgttgcatgagaacgaggaactaatgttcagtttagggatatgaactgttcagaaacttggtctgatcaaagttatgtcagccttaatagtaatctgactgataaacaactaatacttgaaagacggtactgatatggactatttcacctggagattgtttacttgataacttttttttcaagttctgcaaggtgatttaacatccaaawatatatagtcaatcctgggtattcatggaggactgggaccaggacccctcaaatatatcaaaatccacagatgctcaaatccctgatataaaatggcatagtattgacacataacctttgcacagcctcccatatactgtaaataatctctagattacatatagtacctaatacaatgtaaatgctatataaatagttgttacactgtatttttatttgtatttttttattgttgtattgctttttctttcaaatatattccattggaggttggttgaatcagcagatatggaacacacaaatacaggaggacaactatatctaaatctagattaatgtaagyggtgagaaaatattttatctccgtctaagtaggtcctaccagaggggaaactagacycactcaaagattgctttgatcaatccacacacagttcagtgatggacagagtgtcagtatctgttatatgtgtcactatcccatgctagaggtgtcaatagattatgtaacctttctgaggaatcacaatacaataattgataataatattgatcacataaacatagacttccttgacacaggattgccacagaccttcaatttgtaaaaaaaaaaaaaaaatgcaacatctgtggaagtactataaagagaagcagaataaggcagatatgcctgtataagactaagggagaatcttaaaagctgcaagagatgtacaagggatcctcaataaatccatacatctgtggccagtgaatttttgacaagagtgccaagtccattcaatgatgaaataatagtttctttaatatatgctgtgagagaaatggatttccacatgcaagactaaagttgggctccacttcacaccatatgtgaaaaataattcacaacctaaatataagaactaaagccatatagaggaaaacgtaagagtaaatcttcatgatcttgtgttttgggttcttagataagacactaaaagcccaggaagaaacaacaaaaaataggtaaattgragttcataaaaaatgtgaaacttttatatcaaaggacattttcaagaaagtgaaagacaacctacagaatgggagaaaatatttgtaaatcctatgtctgataacatccagaatatgtaaagaacacctacaactcggccgggtgcggtggctcacgcctgtaatcccagcactttgggaggccgasgtgggcggatcacctaaggtcgggagtttgagaccaggctgaccaacatggagaaaccctgtctctactaaaaatataaaattagccaggcgtggtggcgtattcccgtaatcccagctactcgggaggctgaggcataagaatcacttgaacccaggaggcggaggttgcggtgagccgagatctcgccattgcactccagcctgggcaacaagagcaaaactccgtctcaaaaaacaaacaaaaaacctacaactcaacaacaaatagacaaacaacccaattaaatggtcaacaaaggacttgaatagacatttctccaaggaaggtatacaaatggccagtaagcacatgaaaagatgctcaaagtcattagtccttagggaaatgcaaatcaaaaccacaatgagataccacttcgcacttgctaggatggctataatttagagggaaaaaaaagaaacataacaaatgtgcgtgagaatgtagagaagttggaacctgtgtacattgttggtgaaaatgtgaaatggtgtagacgctgtggaaaacagtttggctgttcctcagaaagctaaacatagaatgaccatagaattgtaataccgacaattccactccaaggtgtataaccaaaattattgaacacagggactgaaacagatacttgtacaccaataatcattgcaatattattcacaatagtcaaacaacagatgagtggataaacaatgcctggtacccttccttccttccttccttccttccttccttccttccttccttccttccttccttccttctttttctttctctctttcttctttcttttctttctgtcagtcttgctcttgttgcccaggcttgagtgcaatgacacaatctcagctcaccgccacctctgcctcctgggttcaagtgattctcctgcctcagcctcccgagtagctgggactacaggtgcacaccaccatgcccagctaatttttgtgtttttagtagagatggggtttccccacgttggccaggcggtatacacatttttctattattcggccataaaaaggaatgaagttctgatgcatactacaacatggatgaaactcagcaacaaggtttttgaggaaaaaaagcttagtgaaaaggccacatcttgtaggattccacttatatgaaatacatgcaatagacaaattcatggagacagaaagtagattmgaggctaccaggagtggaaggaggggagaatggggatttattatccaatgagtgcagtgtttctatttgtttttgtttttgtttgagacagggtctcgctctgtcrtccaggctggagtgcagtgccacgatctcagctcactgcagcctccgcctcctgggttcaagcaattctcctgcctcagcctctgagtagctgggattacaggtgtacaccacctggcaaatttttgtagagatggggtttcgccatgttggccaggctggtctcaaacttttgacctcaggtgatctgcatgcctctgcctcccaaagtgctgggattacaggcgtgatctatggcccctgacccaagtgtttctatttgggatgatgaaaacgttttgaaaataaatagttgtaatggttgcacagcactctaaaggtaatttatgccactgaattgtacacttaaaatggtgaaaatagaaaatttcatgttatacagattttgctacccaaaaaacaaaacaaaaaatccaaaacctttatgttattatgaagaagcagttttccaaaggaatagggatgctggtagcasaagggaaagaaatctcattaaataaaaacaaaagcaatgwcctcttcaggaggtggctcagctagtttagctttaccttagcaccatgatggttcattttattcagaaatagaaacatggggcgttggggagaagaggagatgtgtacctgcctcacctgcctccctgcccagaatgccgactccgactcttgcwttccactaaggctggggattaaatgaaaaktgagaatctggaaacccccagagatgatgtttgtcgttggagctgattttatctcattttagtagcatgacctcctcctcaaactcaggatgcaattatggtcaatctcattagtgtgcagtaattgctcagccccaataccagattagcaggaagttctgttattttccttttgaggatgggctcctactgaactgtcctggaatctaccaccattcaggttacaaaagacccagggaactaggccagtccagctcccaaccccaagcagggagcaacttgctcagtccacgttgtgatagctcctcgctgccacaaggtggtgatgttgcatcacacacgcgcatgatgggcgcgcaggcgccaatgctcccaggacctgctgttccattcctaaatgaaagttgttcccaggatctggactcacaagacaaggcagcctrttccctgctggggagctcaggggcaagagggcatctcggagggagggcacattctcacctctgaagacaaggagaacatcatcagcacatagaccaatcccagcagtgcaccttaggatggggagggccactgtgagttacagcaaaatgaacgaatgaatgaaccaataaatgtctgagagggaaagtcccaacgaccctcaggaggtacaatcaagagttgcagttattttcgttaggaacgttctaaacacaggggaaaccttccttccttctgctctattgttggagtggggccatcccgggacaccagaaatcaaggaattgagtttggagaagggacttggggaggtcacagtggcaggtgactgccaaatgaggtggcagaagccagcaagcgctggaaaaagtcggcccaaactgttcaccagcaccgccccccataactccycaccggctctggtttcaagactttccgttttctaggtatttccttggccttaaaccattttcctttaaacgaactttttctgtgaagccatccggtttcccccgatagtggcatctcacaaaggacaatccagtatcccaacagcgtgttgcgttccgcgggacgcagatttccttcacaggcaccccccgggttgcgtttttatagccacacccacccgcccccctatctcctgggcactgctaatgagtcctgcatttctctcctttggtctttggataaatgaaccatccgtgcgtgacctttgcgagggcatcttgcataataccagtacaccagcggcgccgtcggtgagtgacctttgggactggtttctctcaccagcgtaactccccgggagatccgagcaagctgatgagtgtatcagtggctcattctttctgttgcaccacggaccstcattctgtaaccgggataccagccagrgatggggagcgggaggcgcagggcaggggcgtccctcctctcagcacagcctccccgcgctggatttctatcaatccagtttccacctgcctggaagtcagcagggtcctccscagtcccagatcgccgggcgaggccccagatggacctcaggggcggggagtgggcggagcttaggggccgaggcgaggtgtgggtggggcgggacgccgctgtggaggcggggcctgggcgcggacgggcgcggagcgaggcaccgcaccgccggggcggggagtgggcggggctcgggggcggggcggggtgtgggcggggctcacggscggggcgggtgagtgggcggggcctcggcgtggtaggcgcgctgcgtaaagaggcctgcrgtcccgcggcgcggggcaggttccgggctgcttaggttggcaccggtccgtggtccccgggggcgcagtcgcagcgctcccgccctccaggcgtcagcgagtgcgcggtccagtgcggccggaacctggcgcaactcctagagcggtccttggggagacgcgggtcccagtcctgcggctcctactggggmgtgcgctggtcggaaggtgagtgatcccytgtcrgggaccgggggacttgggaaggacagttcccggactggacggccagaacgctctcagggatttcagctggccggccatatggccctgtgggtcgtcgcgcccgggccagggaccattctgtacataggatcgtgcttggctctcacggaacgcgcccacacgcagggtcccggtgtcgaatcgtctggtggaatctgccctcaaccctatggagcgggtgctggtatcatagtcatattacaagtaggaatcagcgggcccaaggtcagtctgtaaagggggtaccggggtttaggcccgtgcgctgcccagcgctgccctgaaggcgcggctgaaccactggtttgcgctgcctttgtcaaggacattgtggcactgtggaaaaaatgaaaaatcagcttctctaacctataatctctctgggaaaaaaaaaaatcagcttttttttttttccccgagacggagtctcactctgtcgcccaggctggagtgcagtggcacgatttcggctcactgcaacctccgcctcccgggttcaagcaattctcctgcctcagcctcccgagtacctgggattataggggcgtgccaccacgcctggctaattttttgtatgtttagtagagacgggtttcatgttggtcaggctggtctcaaactcctgacctcgtgatccgcccgcctgggcctcccaaagtgctgggattgcaggcgtgagccactgctcccggccctctttttcttttttcttttttttttagaagagtctcactctgttgcccaggctggagtgcagtggggcaatctcagctcactgcaacctctgccttccaggttcaagcgattctcccccctcagccccttgagtagctgggattacaggcgcctgccaccatgcccggctaatttttgtatttttagtacaggtgggagtttcaccatattggccaggctggtcttgaactcattcttcttcctttctttttcttttttttttttttttgagatggagtttcactcttattgcccaagctggagtgcaatggcacaatctcagctcactgcaacctctgcctcccgggttcaagctattctcctgcctcagtctcccgagtagctgggattacaggtgcgtgccactacacccagctaatttttggtatttttagtagaaatggagtttcaccatattagtcaggctggtctcaaactcctgacctcaggtgatccgcctgcctcggcctcccagagtgctgggattaatgaaccactgcgcccggccaaaaatcagcttctttaacctttaatctctgaaaaaataaatcagtttaacctttaatctccgaagatcacagccaaagaaatacatgaaaaggaacaagtattaaataatatatacttctagctgtgctgtttatagttttgggaaaaaaatggaaataacctaaggtcccagaaataggaaaatgggcacaaaagggtatgcaggcaatggtttagctgccgcatgaatacacactgaatacactgtgagatgttgtctgttagaatgcccagcacggggactgtccacatggaaagaggcacaggaaaaaaagtgaaaacattataaaataacttcttaaaattaaataatgtacacgtcaaaaatatcagagcccacttgacctggtatatacagtttaataaccacatggctcttttttcctgtaggcctgggtaggtgcatagtttctaaaaagggagagaactgtcactgctgtggatggggtgccaagggaagtgcctggggtcaagtgaacagtgacacaactgcaagtcaagagcctgtgttggagtctttccccactatttcaaatagtatagaaaatagagctgagtcactcaaatagagctgagtyagtcactcagctcttggacctcagattcttattcttaaccgctagggggatggagacagaagtcacaaactcacatgccaccagscatatgatgtaaacatgtaaactgggccaaggaatacaaaagggagtggtgagctggggacactgaagaatggatgccctgtctagaggagtgaaaatgaagcatttcatacaaacaacatgatttcgggcaatcactttgggaatcaggataaggtgttcccccagtctgcagaaacactggcaacatttacaaaggtaaatcatttcatatcactctattttctttttcttttttgagacagagtcttgctctgttgcccaggctggagtgcaatggcacaatcttgactcactgcaacctccacctcccaggttcaagtgattctcctgcctcagcctcccaagtagctgggactacaggcacatgccaccatacccggataatttttgtattttttagtagagatggtgttttgccacattgaccaggctggtttcaaactcctgacctcaggtgatccccccacctcggccccccaaaatgctgggattacaggtgtgagccaccacaactggcgatcattccatattactctccagcttaagaggctccaagggctttctgtcaggcttagaataaaatcctcacccctaccctaggaggggtcaggtcagacccctcccacctccctgactgcatctaccaccacccactctttttttttttgaaccacagttcagccaaacaggctttcttttttttcttttactttctcttttttcttgaaacagagtctaactctgtcacccagtctggagtggagcaatcctctaatctcagccccctgagtagctgggattacaggcatgcaccaccacacctggctaatttttaaaaatctttggtagagatgggatctcactrtgttgcccgggctggtctcaaattcctaggctcaagtgatctcctgcctcagcctctcaaagtgctgggccttctgcttccctgggctttgccaggcctccctatgcattgtgatagccaaagtttgctttctacaaagtcacctccaggcagtgactgtccaccagggcactgtagagcctcccagctaatgatgaagtcactcactctcctctctttttcctttaagataatccctttccagacccgccattttggctcaccctgtaagttacagccccacttctcactgccaagtgtgggtgtcactgctggctcagggagcatggatcctgtaaacttgcctcatcgggaggctttgaggagtgacccccaggaactagacaagtaacttgttcttcacaatcactgccctcccaagaacatccaggatttcagcctcagtgytaagacaaccatgtctctccctgacacatgctcgctgctgagaattctaggaaaagcagagggctgtgcaggcgcccctgcccctaggctaggagagctggcaaatgcctggagacccaaaggcctcatcctcagggcggccaactcttctgttttagtgatatacagactatcttttattgtgatttatagtgcaacttaccggttcaaacaatactacctgtattcataaactttctttttcctttccttcctcactgcccagctttaggttcacccctgtaagtgttgctggtgtcagaataggaacctccctgcgctttgaagggatgaatgtgacctctcccacattctccggtgctgtgatgtaccttaaacacagcaaggtacttggacacaaagcctgtgcctggagcactttcagacagacagtgcatggccctcgctacagactcagtgccattgtagatgtttctgcatggaaaatacataaacacaaatatctgcagttgccaatccaccaccatcttgcagccccaagagagccccgggaatccaggttcctttggtatttctgctccctgcccttggtgcatagcctccatccccaggacgacaagaaggctgactgagccctaacatcatcccacagtccagctgggaagagagccagcgacaaagccagagggagctagctcccacacctcccagccccagctgagttcgcttcttgagggtatttcttggaagccccgcctgtgacttctgctgacacctcactggccatctcaactgcaaggcagcctaggaaatgtagtgcttacctgtacacgtggattcctggaatcaattcagggtctgtccttggggaaccagagtggggatattcagtcacyaaagatgcaggttcccagctgtccagtgaagtcaagcgaatggggaaggattygaagtcacctttgggtgtttggagtgatcagagctgtctgccctcttggggagtgacagtgccccactctgttaagtcccatgcctgcccccaactcagcttcagccacaatgatgtagcctcttttcctttccatccacagggcacctggcctgggtggagcccactcctcagcacccacctcacttcttgcagtattctgcagaccccagccctgtgcctgtgctcctggacagctggagataaggagtgggccctggaagatgctcattcaggccctgctcaagattccagtcctggtggggataagcaccacttttgtgtgtctctgtgctttttgttttgctgtaaagacacactgataggttcacgttgtcgtttggacacaacatgcgcgatgcgtgtcttcacactaagccctagtcacactctctgcattgtttttttatcccattttttcctactgtggtacagaacatctcacataaaattgaccattttaaccactttttttgtttgtttgttttttgtgtttttggacagagtctcgctctgtctcagcctcccgagtagctgggattacaggtgcacaccaccacgcccggctaatttttgtatttttagtagagacggagtttcgccatgttggccaggctggtctcggactcctgacctcaggtaatccacctgcctcagcctcccaaagtgctgggattacaggtgtgagccacggtgcctgacctcattttagccacttttaagggtagaattttctggctgttttcattcatgtactgatagacacttgggttgcttccatgttttagctgttgtggaaaatgctgctttgaacatgggtgggcaagtggttttcaagaccctgctttcagttttttgggttcagagtaacgaatggaattgctgagtcatatgttaattctcatttttctaattgtaatttttgggggcacarcacctctccagcagcggcagcactcgacctttccccagcggtgcacggggttccaacttctccgcatcctcacctacgtgtgttttgttttttggtagtagtagccattctaatgcgtgtgatatgggatctcattgtggttttgatttgcatttccctaatgattagtgatgctaagcatcttttcatggcttactgaccattcatacatctttggagaaaagcctacacaagccttctgcccatttttgcattgagttgtttgctttgttgttgttaagttttatctgagctgtttttttatggtagggagagtgggtttgttggagtctccttgtatctcccagaaggaagccagaatttcagagatggccaggagggggtgaggccaaaggctcccctggggagaactcacgtttttccagagccccattgtgtgccagccaccgcacatagcaactgtctctctctcactcttctgggccatgctgtgactttgttgatgaggaggttgaggcacagaggggtggagggatgtgctgcagggcccacagctacaatgggcagagctggaaattgcaccaagtctgtctgatgcgggggtctcctctgctcctctggcctccgctgcatccctggagaatctctgagacttctggttagagcctgggtctaagccaactcccattattttcaagtgaggggaagggccgacaactgccagtgctggcccaccagagtctggcaccagccgaggagtgcacgcacccattggtggtgtggcggttcactgatyccccagccttctgctcgatctacggggaaaactggggaaggcaggaaggccaaggaggctcaactcctgcttcctaccgtggctcatttcctgggtcctttgctgtatgactgtctggatggaaggttcagagtcctctcaaaaaaggaaaaaagtatgggttttgacatcctgcgtggcttgtcctctgaggcctaaatctccagaagattcctggcctctcttgagaggtctttctctgatgtgtttgcgtgtctgtcagraagcagcagtgatgcctagatgtggtacattcgacctcacctatgcctctccccaccccctctgggttygttttgtcttccagattgctggactcgctgaagagagactacgcaggaaagccccagccacccatcaaatcagagagaaggaatccaccttcttacgctatggcaggtaatgattcactrttgtggagtaagacttttttttttttgagatgggattttgttgtattgcccaggctggtctcaaactcctgagctcaagtgaccctcccacattgaccttccaggtgggagttagactcttaatcagaaattggatacattgttgtaaaaaatccaagccacgtggaagtgtataaaytatctggaattatcttgttttctatgttctcacttgtttcattgttcctttcgactccctccagaatttaggttcctcaaaagtggggccctgcctatcctgtctttgctgtgcctccaggccctgaaattctccctgggctgtagcaggggctcaagtgaatgaaccccaggaggcatcttgggtaaaaattcagtacgattctatctttgcttttgcaactgcttatcatgcacatatacatgaacatgcaatctctcaactttttaatttcacctaacgatataacatggagagcctttcgtgttagaacgcacaggttcaccttactctatacattatggtgtagattcggattttcgcccttggcaccactgacattctgggccagataatcctatgttttggggggtcatcctgtgcaccctgtttagcacctagcmccatccctggcctctgcccaccagatgccagtagcacccctcccccaccggctgtgacaaaccaaaatgtctccaggcattgagaaacgtcccctagcaggcacaacactgccccagttgagaaccattggtgtaggtatttcatttgcatctattctcctgttaagcccctaagtatagttcctttattgaaacaagagtctgagaaagtaaaattaaaatgttaaccatgaatctaacttatggaattcaacctttgtagccagctcaatgccctgaaacccattgcttcaaactgatacgtgtatcttttccttaaagtgtcattatgaaaaatttaaatcaagagtttaacatcttcttaaaggtgaccagggtaaatttaattaagcaaatcaccaggctgcctcccagacgaagtcagtatataagcctggagactctttccaatgaggaaaatactgcttcagaagcccctggtgtgaacgatactgccagtgccaggagggcctgactcttcctagagtcctctttgttatcagcatcaccactgaaagatgggctccatgtggccctgccttcccatgagaccagcgggtctgattcctcatgttttgtttaagtgtcagatttgatggactgggggagatggaagcagaactgtgccacactgaaaggtgcctgtagctgatatctgcaaatgtagggttagcatggaagactaattccagcagttctttattttggtgttagggagctggtctaaaccttcttacagaggataaccaaattaggttgggcttttaaaagatttagtggtggtatttttgaggagatataatttgacccattgtattgtgatgttgagctatgaataactggatttttaaaatgcccattgctttaaaactgccacctattagaaagtttggtatttctggggccaggtgctgtggctcataccagyaatcccagcactctgggaggccaaggtgggcagatcacctgaggtcgggagttcgagaccagcttgaccaacatggagaaacccggtcttaactaaaaatacaaaaaattatccgggcgtggtggcgcatgcctgtaatcccagctactcaggaggctgaggtaggagaattgcttgaacccgggaggcagaggttgcagtgagctgggatcgttgctccagcctgggcaayaagagcgaaactctgtttcaaaaaaaaaaaaaaagaaaaagaaaaaaggaaagaaaagaaagtttggtgtttctggccaagtgcggtggctcatgcctgtaatcccagcactttgggaggccaaggcgggtggatcacttgaggccaggagttcaagaccagcctggccaacatggcaaaatcccatctgtactaaaaatacaaaaaattagctgggcgtagtggcacacatctatcgggggaaattcagccagatattgggcgaaattcacccccaatatttcacgtaggttcttttctatatttcctaagtgtcggccggtctgagaaataaacggacagagtacaaaagagagaaattttaaagctgggtgtccaggggagacatcacatgtcggcaggttccgtgatgcccccaagccgtaaaaccagcaagtttttattagtgattttccaaaggggagggagtgtacaaatagagtgtgggtcacagagatcacatgcttcacaaggtaatagaatatcacaaagcaaatggaggcagggcgagatcacaggaccacgggacggggcgaaattaaaattgctaatgaagttttgggcaccattgtcattgagaacatcttatcaggagccagggtttgagagcagacaaccgatctgaccaaaatttattaggcaggaatttccttgtcttaataagcctgggagcgctacgggagactggggcttatttcatccctacagctggaccataaaagacagctgccgccccgaagcggccatttcagaggcccaccctcagggacgcattctctttctcagggatgttccttgctgagaaaaagaattcascgatatttctcccatttgcttttgaaagaagagaaatatgtctctgttccgcctggctcacyggcagtgagagtttaaggttatctctcttgttccctgaacattgctgttatcctgttcttttttcaaggtgcccagatttcatattgttcaaacacacatgctctgcaaacaatttgtgcagttaacacaatcatcacagggtcctgaggcaatatacatcctcctcagcttatgaagatgatgggattaagagattaaagtaaagacaagcataggaaatcacatgggtattgattggggaagtgataactgtccatgaaatcttcacaatttacgttcagagattgcagtaaagacaggcataagaaattacaaaagtattaatttggggaactaataaatgtccacgaaatcttcacaatttatattcttctgccatggcctcagccagttgctccrttcggggtccctgacttcccacgaaacacacctgtagtcccagctagtcaggagactgaggcatgagaatcacttgaacctgggaggcagaggttgcagtgagctgagatcatgccactgcattccagcctgggtgacagagtgagactgtctaaaaaraagagagagaaagagacagaaagaaaagaaaatttgatatttcttagcttcaattactatgatgcacctgaacattcaattttcatcttagtcttcattgaatttrrcagagagaggttgttcttcaagagsaactgtttcttatcctgatttaggtaagaaagtactcattgtctatgcacaccaggaacccargtctttcaacggatccttgaagaatgtggctgtagatgaactgagcaggcagggctgcaccgtcacagtgtctgatttgtatgccatgaacyttgagccgagggccacagacaaagatatcactggtgagtcatgggataaatgctctatttataaaaacnatctttatgttttttactttaanaaatgttgacttccagctgcaaaatggcattatagaagcaagctagcttcactttccaaaaacaaatagatagcactgggattatcaccagcagtatcccagaagtcaaatatgaagatgaaatagttcccaagaccacacataagtgaaacaactccaagcagacggtaagagattggactatcatatccacgacacccctccccacaaactacccagcaccagctgtgtgggaaatttcctcccaagtcacaggttctacacyggaaaagagatcaagggggacaatcagcttctcaattttctggggttcccagaaacaggcaggaaggagacctgttcctgcctcaacccacaggaagcatcaggagtgcctaaagggagaaatatccctgacaacagccagagacaaaggagggagatgggaatattgtccccagccctggaaactctgatctgtaacttagccaaaggagatgccaaaccagagtggctgttcagcagcaccacactgtaggaggtacattctgcaggtttcctgggcatgagctgctagccagccttcccacactaccatgctatcccctttggaacctctcatattcaggactggcacactctgaacagtaggttactagagctgaggcaaacgtgggcataaaccactatctagtgccaaaaagcaggtggtgacttagtagaggaaaaaaaaaaaaatttaataagaaagttgcaaagactttctaagcaaatatatgtaataaaaatgaaaacaagtcagacatagaagactgaaataaatagatgtcatccacaagaaacaacagtaaacagggaaccatgacctctccacacagacaaagcaaggaaccagtgactgaacctaacgagacggcactgtttggactctctgaccaagaattcagaatagcacttttaaggaaatgtggtaatcctcaagatcacacagaaaagcagttcagaaatttatcagttaaattttacaaagagattgaaataatttttaaaaaatcaaacagaaatcttggaactagaaatayatttgctgaaaaattcattagaggctctcaacagcagaatggatgaagcagaagaaaaaatcagtgaactcaaaggcaggtgatttgaaaatacacagaggagaaaaaagaaaaaggtatggagatttcttacaaaatatagaaaattacctcaaaagaccaaatctaagaatgattggtgcttaagaggaagctgagcaagagcaaggcatagcaagcttattcaaagaaataataacagaaaaattttccaaaacttcagaaagagataaatatcctggtagaggaaggtcatagaataaacagatttgactcaaataggactaccccaaggcatataattattaaactctcaaaggtcaagaacaaaaagaggatcctaaaagcaaataacatgtaacagagctccagttcatctggcaacagacttctcaacagaaaacatataggccaggaggtagtgggacattttcaaagtgctgaaagaacaaaactgtcaaccaagaatactgtacccagcaaatctagccttcaactctgaaagagagagagtctttcccaaacaaagaaaagctgagaaaatgcaccaccaccagacccaccttacaagaaatgctaaagggaattcaataagaaagaaaaacactaatgtgcaaaaagaaaacatttgaagatgtaaaacccactggtaaaagtaagtacacagaacactctaatactgtaattgtgtacagkccactcattactagtattaagtctaacagacaaatctatcaaaaacaataatcactacgtgacctgttaagagccaaagataagcaatataaaatatgtaaatcaagacacagatactcaaaaatgtggaggtgagcatgaaattaaagcgtagagtttatttttttagacctgtttggcattgaacaagacatccagcctctcttgggtgtcagtttgctctctggtaaattgggaaatacaccagtctcaccagttgttatgaagaaaggtgatgtgtgtagagcacagcacctgctaggtagcaagtgctcaatcagcagccctcccagactgcttctctttccctagctcggacccagggtgcagcttctggtcaggttgcagcaaatgtctttgacttgtctgaggagtccggtatacacagtgctactgggatggttgggatgggctgtggatgcccacctaggagtgagaatgtttggcctcttcccsgacagrtactctttctaatcctgaggttttcaattatggagtggaaacccacgaagcctacaagcaaaggtctctggctagcgacatcactgatgagcagaaaaaggttcgggaggctgacctagtgatatttcaggtttgtttttctctaattaatatattgaatcagattcatcttatgtacaaactctttctgaatattgagttttgtgctgcttctggaagtggcatcaatgttttgagcacagttgcacacttactgagcaaatattgtaacctggttacaacacctagttacaacatttcacctagttacaccacttcacctagttacaacacttcacctagttacaacacttcatctagttacaacactactttaaacactgtacgtagatgtaacactactttttttttttttttttttttttttttgagacggagtctcgctctgtcgcccaggctggagtgcagtggcgggatctcggctcactgcaagctccgcctcccgggttcacgccattctcccgcctcagcctcccgagtagctgggactacaggcgcccgccaccacgcccggctagttttttgtatttttagtagagaccgggtttcaccgtgttagccaggatggtctcgatctcctgacctcgtgatccacccgcctcggcctcccaaagtgctgggattacaggcgtgagccaccgcgcccggccgatgtaacactactttaaacactttacctaattgggtaaagatatccacgtagccaatatcactcactccaaatcccgactgccatgtaaataggaatgaaggatmtttccattakyccagtggtccragaatcatctgaaacctgccagtcttgttgcttcccttctcttcccgttcctgccctgagacattctggggctgcttgagaaccacatttatctgcacaaatgtttatcagggtaaatcaggccaaatgcatctccttaaatatcctgccttaaatatcctgatcattaagaggaaaatctctggtttctaccctctcagtggttgcttcacccccagcccagccaccttcctgtatttgttcacaaggaggtgatgccactgcagagtgaactggcccmgcaaaatgccctccaggagtgctgactcatcaggccacttcccgccactgcaaggaagatgtgcaggcatggctgtggctgtgtaaacctggcagcagagtacgcacatgagctttgagggaattgttgggtgacagaaattcctgtccaactagaaggaaaggggaatctattataagggctctggtcacttgggcctcctggatcccaaggacagagctgtagctgctctcgtccwcagattcccatctgctcctttctgcctcttggctctgttctctctcactgcttgccagggactggatcccctagatccagaatttccaaccaagggatctgattggttcagatcatttctgttttccaaccctgcttgaggatgcggagtgggcaggagaacgagagcactgttcgcatgagtccgccatgtgagggcaaggcagggggtgagcggcatgtgaccactttccagacaaaaccacctttccagaatgatgaggttcccaagccttcataaaagcaacctgcatgtgcgggaagagggctgcctcatccctgcccaggcttgcctctgcacaccccttccygacaccagccctttctttactcagtgaccttgagctgctaatctgaccaaagtgcaggacgtcctttgtcctaattacaggtgggtggactcatagtcctcaggcctaggtgaccatgtggtttaccatctccgtcttaataccatgccagtatgacgggcctgtatcctggggtgcgtggtcccagcagagccacgctgagctctctgctctgcttctcctgtcccccttgggtcggccggccacgtggagcccgctttcctcctcgcacccactccactcccataacccggtggctgggtaggctaagacctggcctttctataatggcctttcttttgtttcacttcatttcactccatttccctactttccctttttttctgatagtttgtccagagggtctgcattataagttattcttttattcaacattaataaaaatttcattcatcactactgcactactaatatcagagcccaccactcactgagcattgattctgttttgggcactgtggtgtgtcttcgaatcctcaccaggatgctgtgagctgtgaactattagtagccctatttgatgaatcaggaaaaaggaggcacagggaggtcaagtaacttgccaatgtcacacagcagcaggtcgtggagcttgggtttcaatgccaagtcctgagtttgttttatatggaaagcacaagagacattggcttccacctttggtaacagatgattgcctatgtttatttcccttcccaggcggtaacactggatgtaatgttagggcatctatgggatagggagatcttagcgctggtctaaggaatacaaacatgactttagttggtgtctaaatccatagatgctcagcaccgaactcagtctgacttccagatgctaacaacacaccccaggcaggcgaaggggcatgcttttccatactcttccttttgactggcttgatcacagactgctgctccaaagctggtgttrygcacagctcctygtcccctccctgcctgcccagggccagcatcaggggctgtcatcactgggggatgcagagctacctgtaacagcaacaaggaccattgtcaactccgttcccgtctgacacccacactgcacctttcagagctgaccataagggttaccctcacctgcccagctgccagggaagaggagggctgtgggcttcattccgaatcaccagataaactaaactaggaaacctgaggcgagccgcagcctcagtttctctttggtgttgccgcccacagttcccgctgtactggttcagcgtgccrgccatcctgaagggctggatggatagggtgctgtgccagggctttgcctttgacatcccaggattctacgattcyggtttgctccaggtatgtgctcttggataaggatcactatggatagttggagggaggggacagaggatgcgtcttctatcaagttatatttctagtttccttccttttcttagcaaatatcgattgagcacccactatgtacaaagcaccatgtgctgcacacgggtggacacagcatcgtttctgaaatcntggagctttttgtctggtsgggctgcgaacacatccacagcatactacaygcatggcaaacaagggagtgggycaggtgtcaggtgacgggggacctgggcaaccttatgtgggcaacccggtggccagccctggctccagagagagtatctccctggtgcagagcccagccctggcctggcacaagttcacccccttgagcatcatgtgcctgctgtgagaaaagaccatgcgacacccacgtggcaggatgaggagggcatggaatctggtagatgtgccacatgtggtagctatgaattcttactaaaacaatgatttttaaggcygggtgcagtggctcacgcctgtaatcccagcaatttgggaggccgaggagggtggatcacttgaggccaggagttcaagaccagcctggccgacatggtgaaaccccrtctctactaaaaatacaaaaattagccgggcatggtggtaggcgcctgtagtcccagctacttgggaggccgaggcaggagactggtttgaacctgggaggtggaggttgcagtgagccaaaatcgcaccattgcattccagcctgggtgacaaagcgagactctgtctcaaaaaaaaaaaaaaaaaaaaggaacgatttttaaattctaaaagcttcagaaaataaatgcacgtaarggaaacatactragtaaccaagatgtgtcttggaccatgaatggtgctaccacttactgagcagccctgtgtgctgggaaccttgtcctgtggtcagtgcctcggccgtatccatcacacatggtgtcatggaaaccaggtttccaccagcaacctgggcatgttagagcttctgtgtctgcttggtccattcacttggattgtctcctcctcctcttgggatgtcattgtcacctatggatgggagtgttgcatttgtccatccctggagggtgtccacacgcatgttccctgctggctgtgctgagcccgtgtgctgraggctcagcaacatttctgtcctcttctggagtccacacaaatgcatctgctttctcccttgcagggtaaactagcgctcctttcygtaaccacgggaggcacggccgagatgtacacgaagacaggagtcaatggagattctcgatacttcctgtggccactccaggtagaccagctgcgagtggctcccttgcttgttggcacacgcacacacagacacacacatgcacacatgcatacacacacacayrcacacncatacatgccctcagctccccgaggggtgagatgagatgggatggaagcgtgatgccccacaccattttgactcccctggatacaagaaaattataacattttgccccytttaaatgctttacttgacagatttgaaaagcttgaccaatagggaaaacatgccctaattatagcttttgatatrgtttgggcagaagctaagccaaacctgcttagcttggtcagcagaatggccccaaggtggccctgcgtgtgttgtgatacgtgckggtggaggccatccatatggctctggcagtgcttggtgagggcagcactgcccttggaccctggcaagtggcaccccaggccctgcattctgatggccgcatgctggtctctgctggccatgccaacccccacaggggcaaggggcctatggagccagcacacacccacctcccagtccgcaggcccctcccaggcctgcttccccaggggacctcttggtgcctgcgtgagtgtccctgggcctgaaatgtggccgagtagtggccacctgccaaagggaaggtggtgggcagagcagttccaacgtgctggggtgtcccacgaaggaacccctggtgaggggtggcrgagggagggagtggggagcagactccaggtcaggggctccagggaacccagaaacctaggggtcaactgttcttccaggttgtttaagggaggtttgtcgagacagggggagagctcgttcttgaggggtagggagtttgctgggaaaatgcacgcgtcaccccttttctgtgaactctctctaggtgcacgtgccttgcccatgtcctattggtttggtattttttaattttctatttgtcagygctcttcatatatcagagaaattaatcctattatgtcctttcaaaacacaatgatttttccttctacaggcagtgcacattgactaagttcattccttgcttttgttgttgtttgctattataaataggattttgtcttcaattatatcttctaaaagttcttttgattggtgaaagctattgattgctgaatattggtttttgaccccgaccatttgctgttttctcctcctaatcataattttttcttagttggtttccagtaataaagtcatgttgtctgaagctgggtgcggtggctcacgcctgtaattccagcactctgggaggctgaggcagtggatcacctgaggtcaggagtttgagaccagcctggccaacatggcgaaaccccatctctactaaaacacaaaaattagccgagtgtggtggcggacacctgtagtcccagctacttgggaggctgaggcagcagaatcgcttgaacctgagagacggaggttgcagtgagccaggattgcaccactgcrctccagcctgggcaacagaatgagaatccacctcaaaaacaagcaaacaaacaaacaaataaataaaatsatgttgcctgaggaaaaaaatgtggatagtggtgtgwgggcctctcactccccacctgacagggcaggcctggatgagggtgtgggttttaaagraagtaatgcagaggattgagtgtgacatttttagaaaaaaagtggtcctctttgaaagraaaaagtacgtgattccagttactgatagtctactgaaggaaatgataatttakaaacctgaccttgcttcttcacaggccaactggtctcttatgtgtcattagccaagttcaaattcttcttgcttttaaaaaaatctttttttttttcagtttgcagaagyacatattatggccaaaaaaaaargagacaatatgaaatataaaaagagaaaatccctttaatccctcccacctcagaaagaatcactttaaatggtttgatttattttcttagggcctatatattttctcacatacataatttttattataggtttattacatttactgctcttttacatgaatggtatatcataaatacggcttaaaatttgtttgttattttcatttaacagatatcttgaacaaacttccatggtatatattatagctagaataacctcattctggaataatctatagtgtgaatgtaccataatttgcccaatcaagcagaactataatgtttggcatctgaatcagttgcaaagattgtaggttaattgcagttataaaaatagagcttggaaattgcaactgccccaagttcttcacggctcttatgcaaggctgtgtcctaaagccatagggaagtttagctttcagttgcctgtaacattaaggttgtttcatgattttttgaaggtttgtttcacaccatttycccccttaaatcatttaacygaatggtatgtaacaggtgtagtttctaatgagttmttttcttcccctgtggctttagcatggcacattacacttctgtggatttaaagtccttgcccctcagatcagctttgctcctgaaattgcatccgaagaagaaagaaaggggatggtggctgcgtggtcccagaggctgcagaccatctggaaggaagagcccatcccctgcacagcccactggcacttcgggcaataactctgtggcacgtgggcatcacgtaagcagcacactasgaggcccaggcgcaggcaaagagaagatggtgctgtcatgaaataaaattacaacatagctacctggggatacttttttctttctgttttttgtttgtttttaattttagctttaaggagcacatggccagtactgtttcaggggaatattgggtggcgctggggtttgggcttctattgatcccatcacccaaacagtgagcatagttcccaatagatagtttttcaacacttcctttcctcccttccttcccgcttttggattcccagcatctattgatcccgtcttttcacccctgtgtacccaatgtttagttcccacttataagttagaacatggggaatttggttttgtttctgtgttgattcacttaggataatgacctccagctgcatccacgttactgcaaaggacaggatttcatgtttttttatggctgcatagtattccatggcgtccgtgtaccacactttctttatccagtccrctgttgatgggcacstgggttgattccaygtctttgctactgtaaatagttctgtgatgaacatacaagtgcaggcatcttttcatagaatgattttttttttccttttggtagatacccagtaatgggattgctgggttgaagggtaattctatttttagcaaactagaaatatttaatgaagtacatgaatgagtgtcttcagaattgtacacagtgagatcaaatattttaataatgagcttgttatgttgaattctattctgaccatcaytcactgagattttcttttctttctttcttttcttttctttcttttttaaagagacagagtttcactatgttgcccrggctggtctcaaaccccttgcctcaartaatcttcccaccttgggcctcccaaagtgctgggattgcaggtgtgagccaccacacctggcccagattttctttaatatttgtctaatatctttccatctccctatattcaagcttcatgtaattttattttctggtaattctctgagcatagagctggatttgctagtttttttattttatgactcaacatgasagtttctatttttcatagaaaagttgaatctgggcctgttkcttaattttcttctttgtctttttaaatttacattaggactatgaagttttaattgaacagccattaacatatatggttatatgttgcatgatgtttcaatcagtgatggactgcatgtacgatggtggtcccctaagattataatgccatgttttgtttattaaaatttatttaagatttattttattatttttatagatgaggtctcactctgttgccccagctgggtgcagtggcatgatcatasctcactaggctcaagtgatcctcctgcctcagcatccctagtaactaggactacaggcacatgctaccacgcctggctaattattttaatttttggtagagacaggatctcattatgttgcccaagctggtcttgaactcctggtctcaagcagtccacccacctcagcttccccaagtgctgagattacaggcatgagctgcctgcacctgggctaatacagtaattttactgtaccttttccatgtttagatacagagatacctattattgtgttacagttgcctacagtattcagtacagtaacatctctacaggtttatagccaagggcaataggctctaccataaagcctgggtgtgtagtaggctgtaccatctaggtttgtgtaagtgcattctatgatgtttgcgtgacaacgaaatcaactaattatgaaatcacttaatgatacatttctcagaatgtatctcttttgttaagtgaaacattacaaaatttatttttttgggcacggtggctcactcctgtaatcccagcactttgggaggccaaggcgggcatgccgatcacgaggtcatctcctacaggcagtgcacattgactaagttcattccttgcttttgctgttgtttgctattataaataggattttgtcttcaattatatcttctaaaagttcttttgattggtaaaagctattgattgctgaatattggtttttgaccccgaccgtttgctgttttctcctcctaatcataattttttcttagttggtttccagtaataaagtcatgttgtctgaggccgggtgcggtggctcacgcctgtaatcccagcactctgggaggctgaggtggcggatcgagaccaccctggctaacacagtgaaaccctgtctctactaaaaatacaaatatttagccgggtctggtggcgggcgcctgtagtcccagctacccgggaggctgaggcaggagaatggcgtgaagctgggaagcagagcttgcagtgagccgagattgcgccactgcactccagcctgggtgacagagcgagactccgtcaaaaaaaaaaaaaaaaaattaatggctgggcactgtgggtcatgcctgtaatcccagcaatttgggaggctgagatgggataactgcttgaggccaggagttcaagaccagcttgggcaacataatgagacccatctctacaaaaaatttaaaaatatacattagttaggcatggtggcacgcacctgtaattccagctactcaggaggctgaagcaagagggtcacgtgagtccaggagttcaaggctgcaatgagccatgactgtgtcactgcactccagcctggatgacagagcaagactctttttaaaaatagccaggcgtgatggctctcacctggaatcccagcatttttggaggctaagatgggcagattgcttgagttcagcagtttgaggccagcctgggcaacatggcgaaaccccaaccctataaaaaaaaaaaaaaattagccaggtgtggtggcacacatctgcagtcccaggtacttgggaggctgaggtgagagaatcgctcgagctgggaggcagaggttgcagtgagctgagatcacaccactgcactccagccttgggtgacggaatgagacctgtctcaaaaaacaaataaataaaaataatttaaaaatcattaattgccagttacaatgaaaatttaaaacttttaaaaaatttagtctgatggcattgtaccactgtgccgtgttcacgtaaccctactaataatcaccctgacacacagccacatgcagatggaggaacttccctaaaagcaagtttgagggattaaatatcatctttgtcatcatatcctcctcttttcccttttcctcctcctccttgtcatcactactgaggacagcactgctggctgtgcccaggggcccttcttcctcaacgcccccagcaccacccaaagtccccctctgtggaatcggagcactgagtgtgttggcctcagggacactgaaggaagccgcccgccgcccgtcttctcagccttggagtctgttcaaccattatcattcaaaccacctaccatcaaaggtttgaatacaatgagcagctgctcctgcattcctccaggacacaggttcaccagctgggtgtctgtcaaagacaatgagcctccgagttggtccaaacttgactctccttgaaggtcttctctggccatcctcaaaatccacaggatgaaatgtgttcgatgaggacaactcactcgtgtcgcggcgtttggatgggctgcggcgtggccgcttctgccgtagagacggagccttcctgtggttcgcgcacttccttcctgaagcctcatatttcccattccgttgatacttggccacctcaacctgcaacgtgcagtttccagtgtcatcttcatccaaatgcatgaatgcaagatccacagcttccctcttccaatgatcgcacagcctgtctcctttaagatgtccttggttatctctgtaaaacttgaccttaagttcttctgtctggggatcgctcataataatgccaaatggacaggcgtgtgaatgcctccacggtaacgaccagaggcaaaccggcacatacacgtttgtatttctccttcttcagcatgaagccttcctttttctcccctctttgtgggatcagtgggtttggggtttttcttggtggcagagcagcgccgtcaccgagcagccgtcgctggcctgatatgcagcggtgaagtcttcactggtttctcttctgctcctgtgtgcttgcagaaaccgggctggctcttgattgggattgtaggctgcagaggctggggaagggcagacagcctcgggagacacgccggaaagggcggctccctcgtgctcctcagtgactcagggttttggccacatagctcccctcctccaccctcgctcagcaggctgcatccggggcggggctggcaggcaaagaggctgtgtcacagcccttcagagcctcaagctggggtccctagggtttctggacctcagatcactgtgaggcaggaggtcctccaccctccctccggcaaccctgaagtatgggaaggtgcgttctcgaactgccgaggggcctgttcctgtgtgggttgagaggatgggaagttgctgaaatccaacctctctgagagccggtgctgtcaccttggcctgagtatgctgaagacattaattccggttcccaagcaaaactgttagcaattcgagggctgggctcttgcctagatatcatctcctgttagtaccgggcaccctgatacattttctgccggtttttaagaatttttttttgagacggagtttcactcttgttgcccaggctggagtgcaatggcgcgatctcggctcacctcgacttccacctccctggttcaagcgattctcctgcctcagcctcccgagtagctggaattacaggcatgcgccaccatgcccggctaattttgtatttttagtagagacagggtttctccatgttggtcaggctgaactcacccgacctcaggtgatctgcctgccttggcttcccaaagtgctgggattacaggcatgagccaccgcgcccggccggtttttaagatcttattgctgaaaaacttaaaataaaaaataaattcagtatcagcagggcagcaggaattgccattaaaaaaaaaaaaagaaaattggaaatgactgcagccaggtgtgtgtgattgggccccgcgacctttttcttaggcaaacagggctttgtggatgcagaaagacttctttggttgtgtagtttgtctcagagcctctcgtgggtggagcctggtaaaaagaggaaagagactcatgttgctcaatgtgaggaagcaccaggaattttggagaagttcccagcagctcaggagagtggctggtgccttgtcccaggggagagggaaataagcacaggcctatttctttctcaagacggaaaaaccgagccccagaaaatggcgataagatggggatgcaggaaaaagctagctaatgaacagttcagcagtgggcaccgtgtgggaacctctcctaagccgccctccctctgatggatgcatgctcaagtgatttcgttggcccttaaaggaaagtgttattccatcctgtaatcctagcactttaaaaggaggccgaggtgggaggatcacctgaggtcaggagttcacgaccagcctggccaacatggtgaaaccccgtctctactaaaaaatacaaaaattggccgggtgtggtggcatatgcctatagtcccagctacttgggaggctgaggcaggagaatcacttgaacccgggaggtggaggttgcagtgaggtgagatcgtgccattgcactccagcctggccacagagcgagactccatctcaaaaaaaaaaaaaaaaaaagacatctgcccaagggtcatagctgtagaggggcagatgtggtttgaacccagggcgtctggttcctctctggaagcaaccaaagtgcctgtgattggggtagtgacaaagcactctgagccgctgcatggcagatgctgtgaagagtcatctttgcctgtcccatatctattcccattttttctgattgtaacaccttgtttttttgtgtgtggtgggggaaccatgccctttcaaccaagctatgtggtgttcataagggtagcccctcctccgaccccaggagtggcagttcacagccctgactgatcacagtgttccgtggcctagctgtaaccaccccagggagtgagactgaactcaggggttcattggacctatcaggaaagagagacctttcttgtttctggacttggagctgtgatgaagtaagtgggtcaggggccaacacatagacagcgttggcctacaaatgcagcccaggcagaggacggtgcagccaagccacacagagagacaacttcctagtgacacgctgtgaactcctgcatccacccctgcctgaactggagcttttcctcttcagctcttcagttatgtgaggcaagatgttgccttttttgcttaatgctgtgagttgagtgtacagcagttacaatcaaagaatcctaaataatgctgcaagcatggtgactatctacatgggaatatgcagtactccagtgaagacaaaacataaattaattttggaatctgatgaccataatctaaaaacattcatagaggtatataaaaattataacaaaatttaaagtagcatatctcctcatgaagcaggttaagtgtatacacaaagaaggaggaggaaaaggtgagaaagaatctgcccttgtggggaagtgacagaggcagaagaggctgatgcagtcctgcatccaggcccagctctgccagcagctgagtacccctgaacaagctcccccacctcttcgggcctcactttccccatctatgaaagaaagggagtctagcttccatagctgccccagctgatacgcaaggtgccagtgtgtcctcagtcctgtcaggagaaaccttccccactagaatcccaggaggagcttgaaatcctgtctgggatcctgacggcccaggtgctgaccctgcctcgggttgtgtctgctaagaagtctgatttctgctcatctctccccatttctttcttcccataaagtgggctgatgcgctggaacgtcgatgcatcaaacacatcactggatgtgtttgatgagaatgtattgagagtaaagctgcccagaatccaagtgtgtgtcatctgaactcttgaatcatggatggaaggtatgtcctctgttgatgtctcgcagcctgagctgacaatctgtaagaaggttttgttatcttcatgttacagatggtgaaccgaaacttacagagctcaagtcacttgaccaggctccacccctacaagaggcagcacgcaaactaaaaaccaggcggccttttccaaagcttgtg

SEQ ID NO: 95101 - DNA, 47284 bp, Homo sapiens
  misc_feature (1)...(47284): n = A,T,C or G
ggtggttttccctttacacccaggaaggtctaataccaacaggatcactggctaagattgactagaacacccaacctcgtagccacacaggggttttgttcacagagccatcagctgtggctcagggatgtgtctactaggaggaaggaatgccttattcttttttgttttgtttttgagacaacatcctgctctgtggcccaggctgaagtacaggggcacagtcatggctcactgcagcctcgaactcctgagttcaagtgatcctcctgtctcagcctcctcagtaactgggactacaggcatgtgccaccatacccagctaattaaaaaaaattttttttttggtagagacaggttcttgctgtgttgcccaggactggtctagaactcccgggttcaagtgatcctcctgccttggcctcccaaagtgttgggattataggcatgagccaccacgccaggccgggaatgccctattctaattcacataaagactccatgtgggctagcaggcatgtgaaatgtctgccagtgcatcaacagctatataactaagaagttatctttttcactgtcttctggtactcttcatttcacttgggttttttagcaattcaggaagctggaatgtttgaatgggttttagcttgataccttcttctttttcccatttggcagataataccactagtctgacggataaacacctggacccaatcagggaaaatctgggaaagcactggaaaaactgtgcccgtaaactgggcttcacacagtctcagattgatgaaattgaccatgactatgagcgagatggactgaaagaaaaggtttaccagatgctccaaaagtgggtgatgagggaaggcataaagggagccacggtggggaagctggcccaggcgctccaccagtgttccaggatcgaccttctgagcagcttgatttacgtcagccagaactaaccctggatgggctacggcagctgaagtggacgcctcacttagtggataaccccagaaagttggctgcctcagagcattcagaattctgtcctcactgataggggttctgtgtctgcagaaattttgtttcctgtacttcatagctggagaatggggaaagaaatctgcagcaaaggggtctcactctgttgccaggctggtctcaaacttctggactcaagtgatcctcccgcctcggccttccaaagtgctgggatatcaggcactgagccactgcgcccagccaacaatccgctctgaggaaagcgtaagcaggaagacctcttaatggcatagcaccaataaaaaaatgactcctagttgtgtttggaaagggagagaagagatgtctgaggaaggtcatgttctttcagcttatggcatttcctagagttttgttgaagcaagaagaaaaactcagagaatataaaatcaacttttaaaattgtgtgctctcttcttcacgtaggctcctgttaaaaacaaagtgcagtcagattctaagccctgttcagagacttcgtggatcacagctgcagctcaccgccacatcacaggatccgttaacgttaatacccaatactctgtcagccactgtaggctctaagaaccacgtgcagtcttcagcccattaaattatcgattattttttaatgaattgaatttatattgagtcttcaaattaactgaatggatttaaaggggtaccaaggaggggggaaacatcagaatttcccaggcagttgttgcaaggaattggtactaaccgtgactacaacaaaaattcttgattgacttttaaagttatttcctggcattctggtaccttcacccagcctgagtgccctggagagggaacaggaaatgctgatctctacccctgggtgagaccagaacctcagggctgatactgttgagtggcttcctcggtttactctgtgtactgtgaaagtattttcatattttttctgtgtgccagagtgaaaaaggacagcttctgagtgtggtaattgtgcctctagcacccagcctttcaaagcccacctgaaacctgggggtggatgaaagaactagaatagaagactgaagctgggtaggccgctcagtgtccactggcattttgctaaaccgacaaggaaggctgtgtgcttagctctccccagagggagggcgagaagggtgtggtgatggtcaatctggctgtcggaacagattctggtgtcttgggctgataacagtgttgttgattctgattgtgaatcccctcaactctagcagacacatacacacccctgaaatggggctgcagagcaggctgtctcagccttgccactgtcggcatctcgggctgggtaattctgttgtggggactgtcctgttccttgtaggatgtttagtagcatccctgcccccacctactagatgccaggggcactgttctccccagccccccgccccagttgtgacaatagtctctaaacattgtcaaatggtccaaggaaaggggaaaattgccccggttgagaagagcactgctgtaaagtaatgagcctcggctctcctgtctgcacctgtccggttactacttggccaccacgcagccttggctcctacagcccaaaagggagaatggagggaggctccaggctttgctggaggggcctgggtgagttctgtttgctccttgtaccaccatccaaatggtgttatcaaatctcttagattccaaagaggttgaataattaatgttcaaaggcaagagggcaaggcattttttaacactttttaaaataaaaatttataccacaactttaggctattgatgtgatgtgtcactgggacagatgcggattctccatggtgcctctgccactgaggccgcatttcctgagcataatccccttttaccctcccgctgccaagcaggagacgggatgctgatggtaagaacacctccctgccagtgcattttggcgctcaggatgagaggcctgcagcactgctgtccccgcgcctggctctggggccttcccttcacccccactctctcagcaccatggtgagaagaaccaagtttgcctgtgaggagttaggtacaaggcccaagctccacaagaacactgctgttaatgggcagagccaatgacgacacagaccagcaaagcagaaccgagactgtccgcacttggttcggaaacaaatactcacaccctaggttattgctggtaacggagacctccttccagctcccacagtcctgcttggtagattttctacttgttgctacaatcatcatctttgctttgggtctgtcacgtgaggttagggtttcaggaataaaatgtttaataaatcacaaaatattttaggcagtattttgatgtacattttaatgtgtggtatttatgaaagggaaagggttttctaattataataaaggcataaatagtgtaaatattcaagattttagaagcagctgatttcagagaaatcactgaaaggttaatgctactacagtgatttttacaatatgcaataatccaagtatacgaccaggtatagtggctcatgcctgtaatcccagcactttgggaggccaagctgggaggatcgcttgaggccatgagttcgagaccagtgtggacaacacagcaagaccctatctccacaaaaacattaaaaaatattagccaggtgtggtggtgtatgcctgtagtcctagcttcttggcaggctaaggtgggaggatcacttgagcccaggagtttgaggctgtggggagctgtgatcacaccgtgcctcaataataatagcaatcatcatcatcatcatcaagtatagagtcctgaaattgagagctcaaaactcccccctgccccttctcagctgtgttacccaggccttgcttcctaacctttcgccgtcattatgcaagtatagagtcctgaaattgagcagctcaaaattacttttcagctgtgttacctagggcttgcttcctaacctttcttagcctcagttgcctcatctataaatggagagtgcaatagcacagaaggctaatgtgaagattaaagaaatatgatatatcataaggtgcctggcacaaaaatggcagtttttttaaactgtacgatcttgctatatataaagaactggttgtcaggtatgttacttaaaaatagtgacaccacgctggacgcggtggcacacacctgtaatcctagcactttaggaggctgaggcgggtggatcacctgaggtcaggagtttgagaccagcctggccaacatggcaaaacctcgtctctactaaaattacaaaaattagccgggcatggtggcgggtgcttgtaatctcagctactcaggaggctgaggcaggagaattgcttgaacctgcgaggcagaggttacagtgagctgagattgcgccattgcactccagcctgggcaacaagaccaaaactccgtctcaaaaaaaaaaaattgtgacaccaataacctaaaactcagtgctaccgttttttattagcacaagggtaactggtgttgaaactgtacagacagctatttttatcatttctgagatgaaaccccaatcaacatatcaggaaaaaaggaaatactgacctcaccaaagatttctgaaagtcaaacgatattaaactcaaacattatatatgtctctttccttttatgcaggaattaatgtgatagatttatgttgagagtagaatatgaaaacttttgcatagtctgtatttaggccaaaactgcctttactactcaagaaagtccaatgggccagtgaggacactgcaggtgacagaaatttctatgagtgtaacacctacaagcactgtgctcacaggactgactgttacaccaaaaaggtctcttggaggagaagaaatgcaatatgcaaagaagctgttgtctccaattattcaagccaaggctacaacagtagccacaaatctgccagttatttccaattaaggcagaacgattgacttaaaaagcaatagttgttttttttctccactgagctttcaattagataatgtctataacctttataaagctgcaattatacagccaaaagaaaaaaaattaattgtggtaaaacatacataaaacttaccacttaaaccacttttaggtgtgtagttcagtggcagtaagtacactcacaatgtaatgcaggcatcaccaaaatccatccccaggactttttcatctctccaaactgaaactctgtccccatgaaacaccaactttccattcccccttccaccagccctcaacaacccccattctattttctgtccctataagtttgactcctctaggtaccttattatataagtggaatcacacagtatttgtctttttttgactggcttacctccctcagcatagtgtcctccaggttcatccatgtagtagcaagtgtcagaatttcgttctttgttcaggctaaaaaatgttcccttgcatgcacagacaacattttgcttatccatgtatctgtttttggacacttaaattgcctccacccttttggctattgtgaatagtgccgctgtcaacgtgagtgtaaaaacatttcttcttgtacaccctgttttaaattcttttgggttatatacccagaaaagaaaatgctggatcatataactgatttgttgaggaaccgcagtattgttcatcacatggctgcaccattttacattcccaacagcaatatacaagggcttcaatttctctacatcttcaccaacactaatttctgggggttttgctagtagccatcctaatggrcgtgaagtggtataaacaaaatttagatcccatcatctccgaaaagcaaatacacttcctagtactagtcagtactaaataggtgcacagcgtttagaactttacttgatccaacatagcagcctgcctagagccggagccccgcccactccggagtcccgcctggacgccsacgcagcgagggcgctatggctggcggcctcgcctcctggaaaggccatggtcgctgaggcgacgagcgagggcggggcagcgccgacggggacactcatcccgggagccagagccagcaccgagaggggacggtctacgcgggtgccggcsgttccaggactgcgaaaccacgagccgagtttcggtcgcccatgggaaagcacccggcagggcgtggcttcggggcggggcgggcagagggcggagcaggatggagaggcgaggtgggcggagcagagggcgtggcttcggggcagagtgggccgggtaccgcgcttggtcttagcgcatgcgcrctccyggcagctacgcgacctgtgaccatggtggctgtgctgggcggccgkggcgtgttgcgcctgcggctgcttctctcagcgctgaagcccgggatccacgtcccacgggccggacccgcggccgcgttcgggtaatggcggccacctcgccccggggatccccagcatcggcgcgctcgaggggcggcgggaggggcgcgtgccgacagcaggagttcccggcgcgcgggcacggggcgtgggcgcggcctggctgccctgtcgccctttgtgccgcgagaccccgatcctgggggccagccgcgcttggtgctcgagcccctcgatcgtgcatgcgcctcggtcagcctcagttcaaggagtctggagccgtggaggcttgggctatagagtgcagccccttcagtgtgcagaccagagagacccagggagatacatttgcctgtagtatggactcacccgtgacggagcacggactagaatcccaacgccctcattagtccattgctctgtccagagtccacactaagggcataaggacaataatctcttctttctcttatgtcagaaatcagcctgagcctgagtaccgctaaggctttaatcacsggtcccgagagccctaagtcttctctttgcttgctgatctcgtaccttaatgtgcaaaagaatcacgttgggaactgaaaattcagaatcctgggcctcactcccagagratctgatctacatgtgtggagatgcccaggaatctgctttattctcttttgtcctcccacctgtccccccatttcaggtaaaacaataacaaaaaaactggattaatttctgaccttctgtcttgaaaatggatactcttggtcccaagagatactgggcagaaatgtggatagagcggcatgaagcttgttttactttattytctacatacatccctacacacatgcaaacacacgtatacaacgaacgtacacagtgcatgtgcgcagttgactgttgatgggctactttcataaagtcagtactagataggtacacagcgtttagaactgtacttgatccaacatagaaacttttagtttgaaaacttgatttagaaggagaaaagagggcaaatctgaccagcttttaaaatttcatattgcaattgactagctcctttaattttagaattattataagatggtcagggctattttgatagatggaaaaacatgttaatggctacagctgtataaattaacagtgaaaatgattattttttccagtttcctgtctgcagaaaggcatcgaaataagttactgtgattgtaccaatatagttctttttttttttgagactgactctcgctcttttgcccatgctggagtgcagtgttgtgatctcgctcactgcaacctctgcctcccaggtttaagcgattctcgtggcctcagcctcccgagtagctgggattacaggtacctgccaccatgcccggctaatttttgtgtttttagtagagatggggtttcaccatgttggccaagctgatctcgaactcttgacctcaaatgatccacctgcctcagcctcccaaagtgctgggattacaggcgtgagccaccgctctcggcctaccagtatagttctgataggttatttaatggttgaggaaggccccatccatctagttgcattgcagatcattcttcctaaaatatctctgaagaaacaggtttttctggattttgtacggccgttttataaatgcagctgcaagttgatatgacatataatctgggaaaacaagcagtggtattagttaatcctgaaatgcagctgtagctcagtgtcagtaggtaaaaggattcgtgtaaaaactttgcttcagaatagccagtgcccaacctacaactgacttttgttccaaaaacttgtttgtaagtctgctgtttggaactttgacccttatttcaaaatccgtaaggtgatttattcctgggtcaggtcaagaaaagccttttctacctgaaattggatattatgtgcagttataaatattaataattcacataacctaacaatcttcctaaaaaatattttccaagttcaaccttgggatgccctgccagagaatcagagactgtccttctgctgacgcttgccaccacgctgtatctggcagtcagagtgtggccccggtgcctgagccctcttaggactctgttcagccatgaggttagagaggaatcatggcctctggagttctaatggccccgtggccacttcctagctctgtgagtgtgggcagattgttcaacctctctgagcctcctgccttgcagcgtttttgtgaggatttgaaacaataaatgtaaaagcctggggatataataaacatgaagtaattagtaggsacaatgggaatatttatataatagtacaatatataagagatgtaaaaataattcatcaagattcatgcaaatttcaagccctgaaggtagcaaatactttattgtagataatggctacttcacaaaacatacacaaaagaaatagctgaacatacaatatgataatagcagtttctttttttttttttttttttttttttttgagacggagtctctctctgtcaccaggctggagtgcagtggcacgatctcggctcactgtaatcttcacctcccaggttccagcgattcccctgcctcagccttctgagtagctgggattacaggtgtgcaccaccatgccgggctaatttttttgtgtgtattttagtagagatggcgttccaccatgttgggcaggatggtcttgatctcctgacctcgtgatcctgacctcgtgatccacccacctgggccgcccaaagtatcgggattacaggtgtgagccaccacacctggccgatcctaagctatcttaactgtagaaatgaatttctcagaggaatagggcagtaatcataataagtaaatggcagagtcagtattgccattgcttggtggcttcattgatgcccctttaataatatttctgtagataaggagcttatagtttagtcagaccttattactacccaattctgtcttttatttttccagaaatggtatgttaagagtagatgtacctgtattcaacacatctgtttccacgtttgtttcttttttacttgagactggcaaataagattaaaccaaaagataaaacaggacctcattttttcaaaagggctgtgtttcagttatcctttgactaagggcagaggtaggagtagagagtatgtagaagaaaaaggagatgggccgggcctgtaatcccagcgcttagggaggctgaggcaggcagatcacgaggtcaggagattgagaccatcctggctaacagggtgaaaccccgtctctactaaaaatacaaaaaaattagccgggcgtggtggcgggtgcctgtagtcccagctacttgggaggctgaggcaggagaatggtgtgaacccgggaggtggaacttgcagtgagccgagatggcgccactgcactccagcctgggcgacagagtgagactccatctcaaaaaataaataaataaaaataaaaataaaaggagatggtggttgatttcattgtattggcactccaccaggagaagagagcgcctccttctggcatctgtcctggcttgccatcatgtccctcctgtgcttcactcagtcatctgtctgataagctgtgggaaggctgatggagcctggtcctggtgcaggggccgtctgtgtgccccactggtatatatcccaggacagtctggctgtcctcgaagagcagctgaggagaggttaatcagaacacctgtacggcacccataattcaggcagcacagacactggcattatgcctgtcctgaggcgttgtcctgtgctaagtgtggtccagttagatgctggatcctaggaggtcttaggccaaggcgggtgagtggcaggaaggagggctcttgagatggaggcttatggacagggctacttagcagttgacacagacatattttawcatcttaaaaaacagtaggatttatccgtgcagatgggcactgttgactatggccctcctgcagcaggccagacaacacaggataccctacagctaaagaacagcctggagatcgagaccttgggaccagtctcatctttgggaatgtcaccaaggctgctgaaggtctgggtaggtcctctgggcctgctgagtgcagacgagtgactccagggtctctgcccctgatgtccaccctcgtttcacgccagcctgcacttgaggacccttggcttccagctcaccggcgtgtgccatgagcctctgtggccattgattgagcaagccgcctagggtttttgtagggtgagccccaggctgggcacaatagcgtattcaagcatgagggcacagttcagatcggcagtctagtaaagaaaattcaaactcatgtcactgttcagaattggaaaaatcgaaataacccaaggagactgagaggcgttctggaggcgactcattcatatacaaagacagttttatcatattaaattcgtgctgttaaatgattttcctctgggggtggatttttaaacatttttcaaattttattttttaattgacataagtgtacctgtttatggggtagatagtgatgtttcgatagatacaaggtgtagtgatcagatcagtgtaattagcatatccatcgtctcaaacatttatcatgtctttgtgttgggaacattcagtatcttccttctagctattttaaactatcgcttattgttagccgtagtcatcctacagcgcgtagaacactaacacttattcctcctgtctagctggaattttgaatcaactaagaaatcttcccatctccccttyccccctgtggggatgtgttttttctcttctagcacctcggtaacctctgccaaagtggctgtgaatggcgttcagctgcattaccagcagactggagagggagatcacgcagtcctgctacttcctgggatgttaggtytgggtactttttaatggaatgtttttgcatgctgtaaaatctatgatgcattcacaatactagatgccaaatactgatgattaattttagtgcttttttgaaatgttttcatatttgctacaatcaaacttaaatgacttagaaaagtaggtaactttctactgctgttcagaattggattttttattcctttagtaaagtacccrgtttttcctattgcaagtactctgtgaaatcacagttgcccataatttgggaggstgacaggggtcaaggaaaggggtgtgggaagaaggtaaaggaggaacgtgagtgggtaatcagtcatcctagtttgcttggcrttgggggattttccaggatgtgggactttcagtgctaaaactagagtgaattgatcacttgttgtggttgataatatattccgttaaaataagaggtaagaaaaaaaaaacctcagtttgattctttttagaaatcagagttagattggcatattaccctctctcaatatatgggccataataaagcctactggatctcaatctcattttgcagaactggagttcagatgtagaaagttcaagggaaaaatttgcagtgattccagtacatccgaaatctggttttaagggtgttagtattgttgctttatttttgatttagttaaataatcctaatatttaatctcagtattcctgggggactggatccaggaagccctcagatcccaaaatctgaggatcctcaagtccctgatataaaatagctcaatgtttgcatggaagctacgcatgttctcctgtatactttaagtcatgtctagattacttaccatatctcatgcaatgtaaatgctgtgcaaataattgttattttgtattgtttagggaataatgacaaggaaaaacgtctgtacatgttcagtacagacccaaccacccatttttttcccgaaatatttttgttccgaggttggttgaatccacagatgtagaaccacggataggaaggctgactgtacttatttctttgtgatttgcttctttctaaaagtgaagtgctaaaaaggttccacttgactgagcctcagcggatcgtggcactgttgcacgtgtgtctaaatggtgtttggtacctttgttttccttaacctgatgaacaaggacactgactctcatggctgatggggagctaaagttatctgtaaaaacattgcctatcttagctttccattatttcggtattgcagtcattgtccaggtgctaaaaacttaccaatttaatttttttttttttttttgagagggagtctcactgttgcccaggctggagccagtggcactatcttggttcaccacaacctctacctcccaggttcaagcgattctcctgcctcagcctcctgagtagctgggattacaggtgtgcaccaccatgcctggctaattttgtatttttagtagagacgagatttcaccatgttgtccaggctggtctcaaactgctgacctcaggtgatctactcgccccggcctcccaaaatgctgggattacaggcatgagccacagcacctgtccccaatttaatttttttttatgtaaagtattagcatgattccaatattaaaaaaaatggaccagaggagattctctctcctgtcctatcctcagcacccagttcccctccccacaggcctctcagrtgttacatgctgataactatgtacatgtattccttaaatgtttttttaagttttatattcttggcactggtcttcaaatgtgtacatgtgtgccagggagcaaatgccttcttgtttctgaaattggtcttttagactgttcttttttcccatcttctcacctcctgcccctccttcagggtacttccgtggccagaacccctccaggtcagaggcagaagagaagcctcatgggtcacagcagcagatgtgggctggagatctattcatttggttttggcttgaattttctgaatggtttacttgatcttgggaaagatatatcttgccaggaaaaatgataggccttgacaatgttgaatgatcctgcaccaccttgaaagacattttctaatatggtttgtcaggcaaagtggttagtagtcatttgtggcctgaggtagaagtcctcagaaatcagcagacttcactgataaaatgctgacttgcccctggactgggctctgtgasagtggccttctgcactgtgcacagtaggtgtgaacacaccacacctacagggaccacgtggtgggctgtggactagcggccaagctccctgcaggcccactaatagaattcagcttttagcatgggctgtttcatactgttctgatgaaactgatttggtttctttcctccataccccttctgcatttcagtgtttttgtttagttttcctggtttttaattataactacaaaataaaatctttaggctattcaccttagcttagtaaaaaaaaaaaaaattaaaaatctggaattttagaattctactttgaataacttggaccaaatctcataaatttctttgcagatattatagagatccctctcatgtgtaagtcattgttttaagaagaatagataacccagaagcatatctgtgaattaatttgtatacagtttcattaattctttcctttagaaaaggaagattaagccaaagaggtttcaaaagtgctgaaataatacagaagcaaaggaagacccagggcctctgtctttctcaaaatagccaccagggggaggtcggaggcaggcctgcactccgccgggaaaggaagcgcgcctcctttttttttttttttggtggagggacagagtcgcactttgtcaccagggtagagtgcagtggcgcaatctccgttcactgcaacctctgcttccctggttcaagcgatccgcccgccttggcctcccaaagtgctgggattacaggcgtgagccaccgcgcccggccccttttttttttttttttggagactgagtcttgccctgtgctcaggctggagtgcaatggcgcgatctgggctcactgcaacctccgcctcccgggttcaagcaattctcctgcctcagcctcctgagtagctgggactacaggcgcacaccgccatgcccggctacatttttttttttttttttttttgtattttagtagagatggggtttcaccgtgttgcccaggccggtctcgaactcctgagctcaggcagtccgcccgcctcggcctcccaaagtgctaggattacaggcgcacccggtcagcctgcctcctttcttcgagtggatggattaagtcattgcaaggctgctttcctgattacattctgaccactttgagtagaaactactttgcttttaagattgttattgcttctgttttcactgtaatgtgtttgatagtgaaagcgatcacctgagggtaaccaagtggctgtttttaggaagtggagagactgattttggacctcagctcaagaacctcaataagaagctcttcacggtggtcgcctgggatcctcgaggctatggacattcmaggcccccagatcgcgatttcccagcagacttttttgaaagggatgcaaaagatgctgttgatttgatgaaggyaggtctctgagggaagggccaggggaggaagggtggctgggcctgtcttcatttattttgtttaaattttgttgttatatttttctacaaaataataccatgtgattgctatagaaaaccccaagagttcaaataggtataaagaagaaagtagaaatagcccacagtccagctctctagagacactaccaaatcttggcggctctgctttctggccagtcttattacatcacaaacgcagtttcatattgatggcatcgtgctacacctaacgtttttctaacttactatttttgttgaacaatttttcaaggaaataactttcatgtcaataaatatgcatttatactagttgtatgataggcacatattattccattgtatggatgtactstatcttatttcaccaattttctttttttttttttgagacagagtgttgctctgtcacccaggctggagtgcggtggcgcaatcttggctcactgcaacctctgcctcccgggttcaaacgattctcctgcctcagcctcctgagtagctgggattacaggcacatgccactatgcccagctaatttttgtatttttagtagagacagggtttcatcgcattagtccggatggtctcgatctcctgacctcatgatccacccaccttggcctcccaaagtgctgggattacaggcrtgagccaccacacctggcctatttcaccagttttctaatagtagataattaacttaatttttaagttgcctttttctgctgttataaatagcagrcagtgaacattctgttgctcgtgggcattttcatttttttgccactataaacagtattgttgtggacatcctggactgagctcctggcacacagggagaatttcatacacatttaggagacaatttgctaggtgatggaagttccagatgttcattttgcaggatagtgccacagtagttacaccattttatggtccgggcagcaaatatcttggagtaatattaattctttacctttaattttccagtcattccattcttttttcttggcggcctctctaagatgtaatctttgtccattttccctgccaaacgcatgtccagaccctctctgattcacccgcggactcacacaacctccccatgacgctgttctctgacagcctggctcttgccagttcttcccacagttgctttaccagataccctgcttcactccatccagcagagctcagggtcccctctctgatctacagaactgttctcaaggtccttgctcaggcatgcatatgcacacacgtgcacacgcatacacacgtatgctgtatttgtcatatttaagtacttggtctccattgattctagttccttgagctttttatccaaccagaagatgtagttccctcctaattcaaacccataccgtatgctcaggtttttgtgacaatttccactaaaagtaattaagagaaaacatgatgtcatcaaatggtggactctagggtttttcttttctgactaattgatactccagcctcacacctgtattgattctgataattagtgattcagtttcttttaacagagaggagcaataacccgtgccrtgcattttgtcgtatgatcataggygctgaagtttaagaaggtttctctgctggggtggagtgatgggggcataaccgcactcattgctgctgcaaaatatccatcttacatccacaagatggtgatctggggcgccaacgcctacgtcactgacgaagacagcatgatatatgagggtaggttctgcgaaggggagatgccgggacggcagatccttcccctctctccgcatctcatctcttattgtgggatatgttgacaagacacatctctcgtgcttctagttctcaactctcaggtaggaagaataacgagttctcagaaaagtaatgcagtttaaccagtctgagttttaaagctttctgtttccaggagtgaaacttccatggctcaggaaaaggctaagtaaaatcactatttctatttactactactgataatgaacttcagggaaggagggggtggtgtgaagtgttattaataatctcatttaaaatactgtgaggccaggcacagtggctcatgcctgtaatcccagcactttgggagctcaaggcagaaggatcgcttgagcccaggaggtcgaggctgcagtgagccatgattgtgccactgcacttttgcctgggtgacaggagtgagagagagatgggggaggaaagaaaataatgttgagtgtggaaaagaatcactggatacaaatatgaaaccttttattttgattaaaagaatttctgtgctatttgcatgctttaacgttgtccttcaagcctgtctttgaggttttttttttttttttttgagtttgagtttcactcttgttgcctgggctggagtgcagtcgtgcgatctcagctcaccacaacctcttcctcctggattcaagcgattctcctgcctcaccctcccaagtagctgggattacaggcatgtgccaccatgcctggctaattttgtrttttttagtaaagacggggtttctccatgttggtcaggctggtttcgaattcccgacctcaggtgatccacctgccttggcctcccaaagtgctgggattaccagcgtgagcccccacgcccagcctgaggtctttacaggcactggaataggggccagtgaacttcagcctgtgcattacacctagcctgcctcccacttttgtgcagcccaygtaccaatcgaggtggctagtgctgtgagtcacagagaccaagctggggtgtccctttaccacccagcattgctgccccagacctgcactggtggtcactacacaggggtgactgttggcaatgagcaggcacccagccatggaatttcagtcagcaactcaggagttgcttagcctccagcaagctgccccattgagatgaccaggctcttgggaggaaagaagggtgcaccaggatctaggggttgctaggacaagaagtgaaactgacctgcgttaccctactacccccacctgccagcctggcccaccaggaccctcttcctcaggccactagctttttgtccaagtgtgagtctagtggatcccagatggcctgccccagacacttaggactaggtgggtcaggtgttttctctcctcatgtgtaagtatctacataatgtctttgattttgcttcttggccagcaaaacctaaaatatttatttactctctggccctttacataaaaggtgtacagatctcttcgctagaatatcacaagtctagtctttttcagctattcgacaattcacgtgacttttaagtacgctacttagtggcagcgttctgttgtagaattgtagttcttcacagtctttctgttttttaaatgaatatgaagctcttacggtgagtctgatgtggttgccagtcctgtctgtgctcctgcttgtccttattttgctcctgcctggtatccatcttgtgcacagtaggccattccgctctgtgaagggtctgtcccctcccgcggcctctaggacaggctgccttgagttcttcctccctctcctgtatccttaaattctctccactgggtcagtcctctcagcctgcaaaagtgggcacaattcttcctccagaaagttgccactcctacctgtggttactatcttcccattctttattctttcccacaaacttatggaaagagccacctgcattccctgcttctagggatcctcctttccttccttctttagtccattctgccccatctccctctctggcccattctagccccctctactgaaactctcctcactgacccctgcccacttgttctttcccataatcactatctcagttcatggcctgcagatgacccggcatccaggcagagtcccagatgcatccctcgagggcccagtcctcctctgccctcttcatttgcccaccttgccctgttcattgaactgtgatgctttctgttgttacataatacccctccagttatcctcacctctcttctttccccacattctcctggtttaggccgctagcttcatatggtagtttgttctccataggagagtttcctttgtaaggcaaaaatcyaatcacttaattccactagaggacttaaaatccttcactaaccagcaaagtcygtgcagtttggctggcccctcctgccagcccctccccggacattctcccatctcccctttctcctcatccttccggtgcctctcccacgtgggataaatggccattcctggaacaagcttccccctcatgcctcttcgcctttgcarctgctgctgtgccagcttgcaccagccttcccctcagccacatcctctgccagggcatattcacccctgacacagctccttgggcctccgcgtctgggatggcgtcccggagccctgagacctggcggtgctctccctcctggaccccgccacaccttgcacgtgcctgtgtcacggcccttcaaccccgggcactgtcagcacttactcccttgcctcggtcaccgcagtgggaactcactgtgtgcagttgctctgactttcctttcttgatgaaagcaagagtctctcagtagcgcagcactctttactctctgacgtctcgctacttcccctcctggcyactctttctttttcatcccccatcctctcctaacttgtgtcaagatggctgtggcccgccagtgtgctagagaccaagcccccaccacgcacctcctcttggctccttggtcattctgcagcgtttgagaacatgctcatgatgtgtgcgccattggttacacccctcttcttgaagctttctctgtctggaagttcttgccaccgtgttctcccgacttccctcctctctcaggctgttccctggctgacacgtgcctgctcccccatgtgggccacagtgttggggtcctccaggcgtcaccctcagtgctctgctcccctcttaccctcacacctcacacctgagtagcttcactcagctccttgctccacctaactcccaaaccccacatgttcgactgttgtttttttttaagagacaaattctcactgggtgtggtggctcacacctgtaatcccagcactttgggaggctgaggcaggaggatcacttgagcccaggagttcaagaccagcctgggcaacgtagcaagaccccgtgtctacaaaaaaatacaaaacgtagtcaggtgtggtggcatgtgcctgtagtcccagccatttgggaggctgaggtggaggatcacctgagccggggaggttgaggctgccgtgatctgtgattacaccactgcactgtagcttgggtgacagaggcgagaccctgtcccaacaacagcaacaacaacaaccaaaagaaaaaaacagaaagaaaagaaaaagacgagttctcactatgttgccttattcaactttttattcaattttcttatctggttgtctcacacctactttaaattcagtctgtctaatactgaattcatgatcttctctctaggcctgtcccttctgctaaatttcttgtcattataaataatactctttctccctgaaaataatattttaattactatttattgagtgcctgccgtgagctaaagtctttaacaacgtgatatccatgtaaggtctctgattctcagcctgcttgtcaagtgaaaaacgggggctcacaaaagtgaggaaaccttccagaccacatcccccacactgcggcctgcagctcactgcactcttctcttctgctgggctctgagtggccccatcttgccctccccctctctccctcccaccaggctcccgccagcctcgttggtcccgtctgggctgattctgtgcctctccaaccggtccaggtccttgcctcctaccagtctgccttccatgatgctctgatagcaattcagcaatatgtgaatctcatggtgtcttactttaagccttccaggactccccacaactttcctgataaagttcaggctccttcactttgctcacggaatgagtggcccggcctctgcctctccaggtcccctccccccactttcccctcccaaccaccagtgtccagccatccgagaccacctgggtccctgcagcaggtggcgggctcctgcctccttgtgtgggcccttcccgctcccttcccactccttcacttgtttgctgacttctcttctcccagaatggcccaagcattccatcttctaggaagccctcaccgccgccaccccgtgtccactgcccgtgtgagcacacaggccactctgctacagatggacggctggttcttgtacccgtctcctggggtgtaggagcaacagtatctctctagggtctaagtccatgagtgaaattgctgagtgttgtgggcaggtagactacattacaagtgacagattattttccagcaaaataaatttacacttccaccagcaatagatgagattcttaacttttagctcttcaacaaaaacttgaaattctcagacttcttaattcactagccaatcaaatgggtgtaagatattatcttattggggtcttaatttgcatttcgtattactaataagattgaaaatctgtgtttatccaccatttgagtttcttctgtattatatccatgtatttttattggtgaaaagttttttgttatgtaataattgatacacacaatacagtatgtttgggtatacagtatgaaatgtaacaacaaaacgaccccgccgctgtccacccaactcagcaccagaacagtttcaatgttatcccagtgttactctaatcctagtcagtaaccccttttagggtaactgtgttgcaagcacctcttcacagtgggtggcttttgcctttttctttatgggcagaactacttaatgtaaggaaatgccacagtgttttgtttttctttcctttttctttttcttttctttccttttttttttttttttttgagacagggtctccactattgcccaggctggagtgcagtggcaccatctcagctcactgcagcctgcttgctcaacatcaaactatccttctgcctcagcctcccaagtagctggcactacaggcgtgtgccaccrcacctggctaattttttttttttttttttttgagacggagtctcgctctgtcacccaggctgcgcagtggcgtgatctcggctcactgcaaactccgcctcctgtgttcacgccattctcctgcctcaacctcccgagtagctgggaatacaggcgcctgccaccacgcccggctatttttttgtatttttagtagagacggggtttcaccgtgttatccaggatggtctcgatctcctgacctcgtgatccgcctgcctcggcctcccaaagtgctgggattacaggcatgaaccaccgcgcctggccaatttttgtattttttgtagagacggggttccgccacattgcccaggctggtcttgaactcctggacttaagtaatccacccacctcaaccttccgaagtgctgggattacaggtgtgagccaccatgccgcccggcctcacaatgttttattttctcattggtttggctggttttgtttgattttagatccaccaacatgtttgcccatttgtttactcacctgttctttcttctcaaatgttccttctaaaagcatttatcttctcttcttcctgaagttatttttagaagttatttaagggcagcctgttaatggtcaactcagtttttaccaacaagtgtcttttctttcatccaccttttctgtaagtctgtttagctgagtgtggaaatggaagtggaaaatcattgtctcccccattctgcagtcttctgccttccatccttgctgttgagaagtttcctgtccgtctacgtggttcctgcttcggagtgatgtgtcttaactctctggctgtttttcagattttctccttacctttgatatattgctgttttaatatattctgtccaaatgcagatttcattttacttgtcctgtttggaatacattgcgtttttgtttatggattctttgattcattctgaaaaactctcccacccattatttcttcaaataggcatctcgttcattcttattctcttcttctgagacgagcggacttttgtaaacctcgtctttccatcttccttatctcttctgcatcgtcgtgtctctctgcgtggtgttctgcataatttcttaagatttgtcttccaattttctagtttttttattaactttataaaaatcctgtttgttttgtgacctttggttaggagctaatatttactcactcttaatctgaaaataaacaaagcagtgagcataaatcgagagcgctttccttccgggaagatttgcatttgttgctcttgggaaccacaggatcataccaggttggggccatttttagctcagcttgatccaggagtctcaggttgggccccggcctgcctgcgaacactgcgtctccacccagagcaggcctgcctttggagctggcttacttcctttgctgtattttcagggttctgtttctcatgtgcagacacactcatacacactcacaccccggtttccattaaccactgcaacttcagcaatgccacagaattctgttttgtgaaagatctagttattcccctgcaagaaggcctttcagagggtatggtctgccatacggccaaaagtagaagcatgtgcagggacgttttgctagccatcttcacactgtcttgcttgcttctctctcccttaccctccgcccccaaatgttttcttcttcctacatcttctccccacctcttcaggctgtctccacgtacctcattcaagtcttttcattcttgtgcagagcagttcatcctcttcagcctttatcttcarctcacacggggcctacctctgaatatttaagccagtcagcagaagcaaaggcaggcaccaggcactgtcctgtaatgggggatccgccctcctcagaaggcagttgtgattgtaaatagcagtttttcctccatttggtgatttgaattcactaagcacacagtgagtgcctgccaggtgcctgacgttgtccgggactctgtagagattgttgctcatgtgagttcatgccattagtgttatatttcttccatgtgtaacgtgtagctctcaggaagcaatatttaatatgctcaagagcattagaatctttacttatcacagtgtatttaaagaaatatagaaaacattggcctaaggaattgcatttgttgattcatgttaatggttgtttttagctattcttccctactagtgartcatctataatacagtttgaagtttggtacttagccttttacacccatatttcttcggtagcagaaattagaatgaataatttgtgtgcatttttcaatgtccatacaaatgcaatgcagaaaaaaactcctcttttgcaaacattgtcgctcttcctcaggtgaccctgttagggtcatattttcttttatcttgtatctttaaaggaaagcggtaagtgcagctctaatttcatccacttggtaagcattgatttgtgggcctgtattgtgggaggcactagtgtaggccctggggtacagtggggagcaaagcaaagtcccttacactgcacacaggtcctagtgggaggcaggcactcagccctgggtccagaaggcaccgcaaagcagcaaccagggctaagccgagcagagggagggagggaggcattccaggcagacgagacagtgagcgcatgggctcagaagtggctcttgctcagaatayttaaagacaatactttagtatgaaattaaacctttcttcgcctacacttctgtttttcaggcatccgagatgtttccaaatggagtgagagaacaagaaarcctctagaagccctctatgggtatgactactttgccagaacctgtgaaaagtgggtggatggcataagacagtttaaacatctcccagatggtaggttacygggcttgaagggctctctkcctgttatagagggtgctcgagttcctccccagtgttctggaattgctcagtgattcatgaatctgcccatcgccctcacaygctcatgtgtgagcagaacagagaatactagttcttgtgtactgtgccagttcttgggcagtcaatctggcttaacggagaggtaggactgcgtgtccaaaggttcacattgttgagtctttaatagcagactgctcttttttccttctaatccttggtgtgtgtgcgatgacaaaataattatccagaagccttaaaccgtttctattttctaattccagaatgagtaattcgaaaataaataggccacaatgtgtacaatattttttcctttttacacatttagatgtgtctccccacgaggacactgttaatctttaatctcaacggaattaatatgaggaagaaaatattcygttttttccatcttcagaactaagtgatatgactgtaaccatgaacaatgcacaaatgtctcctattcttttttttttagatggagtctcactctgtcaccaggctggaatgcaatggcatgatctcagctcactgcaatctctgtctcctgggttcaagcgattgctctgcctcagcctcccaagtagctgggaccacaggcgtgcaccaccacacaggcacattttttttgtattttagtagagacagggtttcaccatgttggccaggatggccttgatctcctgacctcgtgatccgcccgccttggccctcccaattgctgggattacaggcctgagacaccatgcccagcctcctattctttatctgaaaaattaacaagatttccagttaaagtaagaattgacatctttaagagaaattctgaattatagtttattttcatacagctgtttatgtttataatctcatttttttttaattactgagaaaatagagtagctaagatctaatcttggagtgcattgttacaaaatggttgtgattgaaggaccaatttgatccattaggtaatcatttcctgcatgaatcatctgccaaaactttcacaatgaaaaggacatttggaaatgttactcttctggtttgagttgaaaacagcaaatatatcaaatgtatgccttataatgtttctgttcagatgcagcatccacccatggagacaggccctggaaatctctgctcttaaaacaaaaaaatgccatgaaacgatgtttgagacagttctccattaaagagggcacatttgtaaaatgtaaacttggatgttttgttgaagagagtagtgaaaagacaggaagatttaaaggtggaaatagggttaaatcagcaattcaaaaatacgttcatgatacagaggctgtagcagtgtataaactgtctcacagcgaggsccttcgtgatgcgtcccccttctgtgctgactcatttggtaggagccctcttttccgactgtcctctcaggtttatggatgcttggtatagtgtagggattcattgcattgcacggctctggagtgcgatggccctgagtgtgagttctgcctgtgtccccggcttgctgttagaatggatctgggcaggtaacttagcttcttgaagcttcggtttcctatctgtgacctcgaaaagctgttgttgtggggattaaatgaggtattatctattcagctttggtgcaggatcaaagacagagtaagtgtctagtgaaaggttggtattactgttattacagaagtccttaatgaacaaacatttttatatgctgaatgagttaaaacatgtaactactgtgtttaacagatgtgaaattgtttaaacagttgctggcaccaagtgagcactcaggcatgttgactttgatcatcacgtgatgatgcagctggccggtgtgtgtcatctcgggacaggagagggaagtgtcagagacctggagaagtatttccctagtcagcaggtccgcttctcacttagcaggcagtgacttcccactgaagaggagggaaaggcctggggcccgtgcagggcgggggagcactgccccgtcggggcagctcccagccttctcagagctgcagtgccttcctcttgacacacacggagagggaatggagaaggaaagagctagcttagggatgccaggaaccgcagacgcaactctctttttagccccacaacagccccggggaactgtgattgttcctgtttgtggctgaagctcccagtggttaaggagccaccacagcctcacagaggcaggaaamtgcagtacagggactagggcccaggctgtccatcattgcctcaggaaagttctcataaatgggggtaagtccttacagtctctccaaagtatgttagtcaggagtgtcacagatgcatcagcgataaggagaagctgctttaccgtgcgcaagttgtataattaattccttgtgaggttcatatgctttgagggctggccggggcccctacactcatctgaaacgtgatttccagggaaaagctctacaggtgtcaagcacctaccactgttttcacggtgggaaccgccactgtggaatatagtggtggggtgtttatttgattttcctactattttatgcgaatttaaatcaggctgcttatttactagtagaactcagaaacaggcaaacaaacaagaaacagagagaaacagaaaagggaacccaaagaatgttagagctggaaggaatcccaggcacggtcaaatccaaaacacagtttttacggatagggaaactgagggccaaggaggggcagggctcgccgagtttcgcctcctctgaccgcgtagaatggttgcactaaagcagattcctcgtgctgtgtatccgtcaggtaacatctgccggcacctgctgccccgggtccagtgccccgccttgattgtgcacggtgagaaggatcctctggtcccacggtttcatgccgacttcattcataagcacgtgaaaggctcayggtaagtcctgtcaccgccttcacactccccccgagagcctcrgagtcaatgggcaaagctactggaaggaaaataaccaagaggagttggagttttagagtgcacagccccccttttgccaatgccagtcagtagcaccgctttatttagggtaccacggaagagagaagccctgaactgtgggtgactgataaccagaaggaaaggcatgttcagatagacagctcttactttcatgagtggcaaacatgctcataggtgctaagccctgtcacttggtaatagtttagatttatttccatcagtattaaccgaaacagtttcacacaatttgggaattttcagtttagttttttatcattataaaagcactgaccacccaatttaaaaaaatctgttaaaccaaatttctgatgtctgctgacagccagccctactcagcacagttaatggtagtgttccctgtccctaaagcccccaggccagcagggaaagcaggcacagaaacagctccactgctcccttctcgctctgttctatgatgtatttaacaacagatttctcagagaatttttaaaggaggaaaaaaagtttcttttctataataaaatacaattaccataaacctttataattactatatccataatggataatgctatatccatttagcattttttaagttaacaggcatctctttattccacacattcctcctataccacttcaaccatgaatcaaaaatacacatgagcctgtataacaaataattcatttggtaagagcatagagtcagtgaagagcaaaggtgggagttaggcaggattatactgcgggtggacaaagaggtttaatgagggagttggtttttttttggagtcggagtctcgcactgtcacctgggctggagtgcagtggcacgatctcggctaactgcaacctccgcctcccaggttcaagcgattctcccacctcagtctcccaaataggtgggattacaggtgtgcgccaccacgcccagctaattttttgtattttcagtagagacgggtttcacaatgttagccaggctagtctcaaactcctgacctcgtgatccgcctgccttggcctcccaaagtgctgggattacaggcatgagccaccactcccagcttggagtttttaaattgatttagtaggggctgggcacagtggctcacacctgtaattgcagcactttgggaggctgaggcaggcggttcacttgaggccaggagttcaagaccagcctagccaacatggcgaaaccccatctgtactaaaaatacaaaaattagccgggcatggtggcgggtgcctgtaaccccagctactcaggaagctgagtcaggagaatcgcttgaacctgggaggcggaggttgcagtgagccaagattatgccactacactccagctgggtgacagagtgagactccgtctcagaaataaataaataagtataaatttatttagtagcgaataaaaggtattttcaaactagactttataaaattataatactaagttatggtcatggtacaaaattccagtagtatactttcttattaatccttgcaaaagttttttttgtttgttttttttttgaggcacagtttcactcttgttgcccaagctgaagtgcaatggcgcgatctcggctcactgcaacctctgcctcctgggttcaagtgattctcctgcctcagcctcctgagtagctgggattacaggcacccgccaccacgcccagctaatttttgcatttttagtagagacggggtttcactgtgttagccaggatggtctcgatctcttgaccttgtgatccacccaccttggcctcccaaagtgctgggattacaggcatgaaccaccatgcccggcctgcaaaagttttttatacaatctcagtttttgtgcttttgattgtatacgtttgcagtgtacaaagtgatatctccatatagcacttaatattttaaaaggtattttatatatagtatctagttatagtttatgacatatttatgaaaaatattatccattttacagatgagaaatcatggctgagagatgttaagcaatctttcaaggttgtatagctagtaaataattaatcttagatttttctcctaatatggtgcttttccaccatagcacagctgccacttatctcttaatatgtatgatggtaacatgcctagaataagataccaggtgacctggttaattgtcttccagcttcagaaatgacaggttttgcacagtgacacacatagtaaatgtgttatgtgcccttaaagagccaggttcaattaaagtcagtctacaagaaagtttaatttaggaattaaagtttaatttaggcccatctcctagcaacacagtacatcagtataggagaaaaacacccttacaggctcacacctgtaatcccagcactttgggaggccgaggtgggcagatcacttgaggtcaggagttcaagaccagcctggccatcatggtgaaacctcgtctctactagaaatacaaaaattagccagacatggtcgtgggcacccgtaatcccagctactcaagatgctgaggcagagaatcacttgaacctgggaggcagaggttgcagcgagccaagatcacgccactgcactccagcccgggcaacaagagccgaaaccctctctgaaaaacaaacaaacaaacaaaaaaacacttaaaggcacagactatcccttcccagatttttaccaagaaatacagattatgtgtgaagcaaacaccaaactgcctttcttgcctcagaaggaggctgaacaaagggtggagttgctcagcaggtctgcttccagcttatgttaatttgtctctttctctcttctctctttgtggtagaagaaaaataagaatcgcttatttttattttaagcaaagaggccttagagatcattcaagctcagtgattttaaaatgtgtttttagtcggttgaagcccttccgctaacaagcacttgtgctgcagtctgagatacgaaacacactatgagagctgctcagacgacagcagtgatggggagcaggctttgcctttctgcctcccgtgtccacatttcctcctataagtacagcggtcgtaatagattaggacctactcatatgacttcatttcaaatcaattacctctttaaacactctacccaaaggaggtcacactctgagatgctgggggtcaggatctaagcatatcaatatgaggggtgcaattcagcccatcacagtgcttctgaggaggtgctcggatctcaggagccagaggcccggttctgggtttcagactcgactgcaaacgatgagtccctcgcctctcgcctgcggcccttctccacccctcagctcctgcctttgcctgcctgggtgtgtgcccaccccttaggccaggactcaggcggctcctcagcgaggcttcctcgcctctgcatgcgcctccagttgctcgctcacctatctgaggtcatgtggctccttataccttttttcttcctctttttttgtttttgagacagagtctcgctgttgcccaggctggagtgcagtggcgcgatctcggctcactgcaggctctgcctcctgggttcctgccattctcctgcctcagcctcccgagtagctgggactacaggcgcccaccaccacgcccggctaattttttgtatttttagtggagacggggtttcacggcgttagccaggatggtctcaatctcctgacctcgtgatgcacccgcctcggcctcccaaagtgctgggattacaggcataagccactgcacttggccttcttctttttttttttttttttgtttttttttttaagagacagggcttgcactgtcatccaggctggagtgcagtggtgtgatcacggctcattgcagccttgaactcctggactcaagtgatcctcccacctcagcctcccaagtagctcagacataggcacgtaccaccactcctagctaattttttgtgtatgtattttgtgtagagaaagggccttgccatgttgtccaggctggtcttgaactcctgggctcaagcaatcctcctgccttggcctcccaaagtgccgggattacaggtgtaagccactgcacccagcctctttattcatatctctaacagctgctaacgtgaatgcaattcttcccatgttgaacactccaccgcctatcccaggatgtggtctagagcatctgaacatgctcagtgcatgttgaaagagagagagggagagcaagaggtgcacagagggccatgtctctgtggatgggctggggtcaccagtgcaggaccagccgcgtgttctgagcccaggcctgagggccagasccggtgggaaagtccatgtggcacagagttggcatcttaagttcgtgtcaactaaaggggagggagaggggttaagagcaccagcaggggactcagacctcggttggagtgctggtttgggtttgaatgctggtgtgggttggagtgctggtgtgggttgcagtgctggtttgggttggagtgctggtttgggtttgagttctggtgtgggtcggagtgctggtttgggtcgagtgctggttcagggtggagtgctggttcggggtggagtgctggttcggggtggagtgctggttcgggtccgagtgctggttcgggtggagtgctggttcggggtggagtgctggtgtgggttggagtgctggttcgggtccgagtgctggttcggggtggagtgctggttcggggtggagtgctggttcggggtggagtgctggtgtgggttggagtgctggttcggggtggagtgctggttcgggtccgagtgctggttcgggtggagtgctggttcagggtggagcgctggttcggggtggagtgctggtttgggtttgaatgctgattcggggtggagtgctggttcggggtggagtgctggttcagggtggagtgctggttccggttggagtgctggtgtgggttggagtgctggtgtgggtcggagtgctggtttgggtcggagtgctggtttgggtcgagtgctggttcrggttggagtgctggttcggggtggagtgctggtttgggtcggagtgctggtttgggtcgagtgctggttcaggttggagtgctggttccrgctrgagtgctggtttgggtcgagtgctggtttgggtcgagtgctggttcaggttggagtgctggttccggctagagtgctggtttgggtcgagtgctggtttgggtcgagtgctggttcrggttggagtgctggttccrgctggagtgctggtttgggtcggagtgctggtttgggtcgagtgctggtttgggttggagtgctggttcgggttggagtgctggttccagctggagtgctggtttgggtcggagtgctggtttgggtcgagtgctggttcggggtggagtgctggttcgggtccgagtgctggttcgggtggagtgctggttcgggttggagtgctggttcggggtggagtgctgatgtgggttggagtgctggttccggttggagtgctggttcgggtcggagtgctggttcgggttggagtgctggttcggggtggagtgctggttcggggtggagtgctggttcggggtggagtgctggtgtgggttggagtgctggttctggttggagtgctgattcgggtcggagtgctggttcgggtcggagtgctggttcgggtcgagtgctggttcgggttggagtgctggttcgggtcagagtgctggttcggggtggagtgctggtgtgggttggagtgctggttccagttgagtgctgatttgggtcggagtgctggtttgggttgagtgctggtttgggtcggagtgctggtttgggtcggagtgctggttcgggttggagtgctggttccagctggagtgctggtttggggtggagtgctggtgtgggtcggagtgctggtttgggtcgagtgctggtttgggtcgggagtgctggttcggggtggagtactggtttgggttcggggtggagtgctggttcagggtggagtgctggttcgggtcggagtgctggttcggggtggagtgctggtgtggtttggagtgctggttccagttgagtgctgatttgggtcggagtgctggtttgggttgagtgctggtttgggtcggagtgctggtttgggtcggagtgctggtttgggtcgagtgctggtttgggtcggagtgctggttcgggttggagtgctggttccggctggagtgctggtttgggtcggagtgctggtttgggtcggagtgctggtttgggcgagtgctggttcgggttggagtgctcctttggtcaccatgtgctggatgtaatatttctgtactactgttacctcttgtgtgaaatgagcatgacaatacctatcatctcaagatagtttttgaggaatgaatgaggaggtatttgtacatttggacttaaatttaagacttaacacacccagcctgggcaacatgctgaaacctcgtctctacaaaaagcaagaaattagccaggtatggtggtatgcacctgtagtccaagctactcaggaggctgaggtaggagaatcaccagagcctaggaggtggaggytgcagtgagccatgatcatgccacagcgctccagcctgggtgtaggaatgagaccccacctsaaaaataaataaataaataaaaaatactcaacagacagtagctgccacttttgaggatggaatgctggcatggatacaggtgaatagggcccccagaggacattggggcatagcttgaaattaggtcaggcaagttgccatctgttccaactttcagcaccattattatttgtgttatttttaaattttttaagagaaggtctcgctctgttgcccaggctggagtgcagtggcccgatcatagctcctggcagcctcaacctccttacttcaaaggatgctcccgcctcagcctcctgaatagctaagacaacaccattattagtgtaggtatatgggcatatttgggttctccaaaaaaaaagaaccaacaagacgtatatgtgtgtatgtatatataggtagaaaaaagagattcattwtagggaattggttcatggagtatggaagctgacaagtcccaaggtctgcagagtgagttggccagctggagacccaggagagctaaaggtgtgattccagtctaagtctgaaggcctgacagccaggagaggagatggtgtggttctagtgtgaaagccaggaggcttgagacccaggaagagccaatgtttcagcctgagtccaaaggtaggaaaaagccaayatcgcagactgaaggccaaggaattccctgttctcagccttcttgttctactcaggcttttagcagattggacaagacccaccacactggggagggcctctgcctttattcagtcagtggattcaaatgctaacccatccagaaacaccctcatgaacacactcagaaataatgtttgaccaaatatctgggcaccctgtagcccagtcaagttgacacaaagtgtacagtcacagggtgaagggctgatggatgccatctctacagaggtctgggccttgtgttgggttcaccagagggtgtgctggcaggctggcagcgagggatcaggcctgggatgtctgtgcagtgggctagttactctcctctgtctggaccacagaagggaaggaagggcctctttctgcagcttccttggctgtttgggtctggccaccagtggtaagatggccctagtcctcccaggcaggccagtgggagccttaccactaggtggagtgaaatgaattggcttaggtggaaaagattcacaccagtgataatggttcattttcagctccatagaaaagtgaagccaggttctggtggggaggtagacgctgcaggcagccagggctgcagcttccgttctggactgcctccagcctggacgcagtggtttgccagctcctctgctactgccccaggtgacagttccccaccactggcatcccagccctcctcttcccaggtgctgctttcagctcctcccagctgctgctcaggtggaagggaaaaccatcagctccacacgctgcttgtgggctcgttacaggatttactgcacacagaattagccagtgcttatcaagytgagtcttttgtattaatatttcaaaaacagtgtggtctgaacctttccagacaaatcttacatgcaagattatattaaaacctctcttaagagaagaaacctccagttggaggtgttgtgttagccaacaaatgtagattaattgtgctcccctgagtcagtcattgtttaatatgctgcacagattaacaccttcaggaattctgcacattgtaaagtgcaatacaaatatactaataaaataacagcagacatttattaagcttaccacgtacccrcagaccctatgctgcatacgttgaatctactatctcattcatcctcagaatgattctatggggtagattctattactgtccgcattttccagatgaggaattgtgactcagggagatggatgtagcctgtcagtatggactctgtgctggttagacaaaactgtcctggccccgtaaagccagtgttttcctcccacgatgatgcctccagtttacatccaaatgtcacaggaagaaagctttcctgcagtccagggcccgactaggtccccacagtcacagcagatttggaaaggctttgtcctccacacaccacttaaaagcaccaacccaagcagcccgagggtcctctagcagcccacttcaagccrccacactgcccagaaagtagcctccggggcagttttgcttctaatgcttgtgtctaatgcttgagacatggttgcttttgagaaatggagctgctcagtgagctgtcgcccccaccatccccaaatgcctggtcagccctaaccagaggagagcctrgccagccagggcagcccccaacttcatcagcagcaaggagcttgtggtttgaccattacctttttgtttgtttgtttgtttgttgtgagatagagccttgctctattgcccgggctggagtgcagtggcgggatctcggctcactgcaacctccgcctactgggttcaagtgattctgcctcagcctcccgagtagctgggattataggcgcgcatcaccacgccggctaatttttgtgtttttggtagagatggagtttcaccacattgaccaggctggtctcgaactcctgacctcaagtgatccacctgcctcggcctcccaaaatgctgggattacaggcgtgagccaccgtgcccagtctagtacctttttcttaggtggggctttctagaagaagcagaatgaaaaaggaaaatatttagtttctgaataaaaaggggctattggcaaccaggtttggatggcgtcagaaggaatgcctgaagaagtgatatgccatgttgctgcccagtttcacactggaagagatcctgtgcaaagatccagcrgcctgctttgggttccagtaaacacaaaagtacgtactggcactctgcggattacagactcactgacaacttcrtggattcatagatcaagttttgttacattgatccaargtgaaggcacgccacagcaggttacttgtggccttgttactgtctgtaactccytgagttacagatgaaagttcagctaaagatgaaaagggctccaggcggggcaggaaaggtagcatcgtgaggccagcatctcacctatgscattttgacctaaaagagctgtatcaacagaggtaaagtgacccatacatttaccttggggttagacagcttctagttccttggactatctggaaccatgtctctttctgaaggtgccacatgcagtgaggaacctgccctggcagaggaactcgtgttcatcctctgaggccccttygtttccaactgagccatgtgcttagcagttgggggtttcctactaatttttcggagaatgttattgtttgaaaagtgctctccacagagcatgtgattagatctttttgttacttgggtgagaatctagagctcctgtcttgccttgacagctaatattcatgcccatctattgtggtcctgtttccaaagaggaacacacaacagagtttctgtgcagtgaaacctgtgtcagacctaaaggaggcaagggctgctgaggagcttgaaatgacccttaaaagatatcaaggagaagagttgtcttcatactctcttctrtctgtctgtccatctgtctattcatccattcatccatccagcattcagagcaggtctcccatattttaatgaagggaacctcatttttatttccccaagatctagagattaggaagagtgcagacagtgctgaacggctaaaaagaaasgattcacagcgaggttctccttccttccttatgggaaaccaacaaatcatagccagataggctggactgtctacagagaaagacttcacatgtggcaggctggggattccctgcctcccagtccagcttagtgcagattaggggatgcaatttagcctatacgtgaccttctatgacctcgcagcatccttggcaattcgttctttcctgtttcctgaaaacaaaggccttgagtgtccctgcaagccctgttccttgtgtaggcaactgggatcctatctctggggtgggtgcaactcatccktcttttctgaatagtgttaaagttgaatttagaatgtcrtgattgttagtaatagcattactaatgttccaaggccctcggaaaggtcccaacaatatgtcttcctttcaagttgattctcttggtaccccattcccacccccaatgtggtggctgagttggaagaggcccagcatcttccaagcacagctccctgccccacagttcctccctcrcacctactgaggttctgagctgtcagccccccagtattgaaastmaaaaaattagggaacatgataacgcattctgccctaatattgyccttttaatgtytaattatcattgtagacaaagtggcttgaacttaggctttcatcctagaagctttaccacttttactgtttctatacttttgtagctaataagtcaaatgtagaacaaagagaaggctgcatttrttcaggaaactgtaaatctgtcccatttgatcacaatcctgttgaaaggaagaagccttacgaggacagtgtgtttgctacaatgctgagccgtgacagctgcagcagcggctcctggagcacagggctgctggcatgggctcaccaccctcacagccatttgtctggcggcttgtattcagatgtatttgttcagtaatccaaaaatggaagggtgatttggaaccttgagcagcaggctggggrtggctgtgaattctgctttgcacttgcccactacatcaacacsccaagaaactcacctgccccatcccagtgcattctgaacatttcttatttttatcttcttaccaaccttctctcttaaaatcagcttcattaaaatggatttttctagagtaaccaccaratcacctcccccactctcagtccgttttccagtcaaacsatttgttacttgattcagttccaaatataatgtgtgtctgctactgttaagtcattgccttatagtcaacctcaagggtagtcataaactccaagagtttcacgtgtctgactatattcttaggagattgatgggttacatttttctcctcgatagtggtcatgggggaaatgtgttaatttttcactttagatgtttgtgaaatgttggggagagtgaggggtttgttcttaagtggtgggccattgacccaaagtatttttaattccttttttaggctgcatttgatgccagaaggcaaacacaacctgcattygcgttttgcagatgaattcaacaagttagcagaagacttcctacaatgagaatgcacactcsagtcttggtggttccttcgtgtggggcttgatcgtgttgctgcctgttaacatgatgcctttgaaactctccgcctttgaaactttctacccctccyttcaatcttatcctaaccaaatgagaataatgacatattgaaaacagcctctagcttcaggctgggcacggtggctcacagctataatctcagcactttgggaggctgaggtgggagaattgcctgagcccaggagttcaagaccagcttgtgcaatatagggagactccggctctacaaaaaagagtttttcaaaattagccaggcgaagtggcacacatctgtggtcccagstgctcaggaagctgaggtgggaggatcrcttgagcccaattcaaagctgcagtgagctgtaattgcatcactgcactccaacctgggcaacagagtaagaccttgtcttaaaaaaaaataaaaacataaaaaaaaataaaaaaggaataaagcctctaacttcaatagctatgaaaattaaatccgattttctaagatgaagttgtgacaagttataccattgycttaayaggtgaattcctgccataatttattttcaaataaattttaggtggagaatgtgtagtgttaatgttggmgattttaagmcatcttgaatttgtactgtaccttttatctgagaggttcaagcttcacttgtgtttttatttgtgtttatctatcatattcaaagagaagtagggagagtccgtgcccgaggtcctcaattctaagatcagaggatgtccagaacagcagcagataggggcaggtttgctttaccccatatccctctcctggttcacttttgagagatgaatactttgggccagtaaaggtgaacaaaatatgtattttcatcactctgtactaaaaggacaggaatgtwattaattaaaacactaaagcagaaatcctacattgctattaaaattaaactttgattaccacaataaaaacagtagcaagttaaaccttgacactttatacttaagcatttagagaaagaataaaaattatttgaagtgagaacacagaccacaaggttttctacacatgcttttttattagtatagataccttcacagacaatactgtaatttttagaggagttccacatcattacatcaacagkgkgaatttctaacagaggcaaaactgagcaccatagtttacaagtagaaagaccatgcttgaggacaacagaagttcactaaggatgcacgattgatctgagaagtttttaagcctcgtcctcrccctcctcctcctcgaactccccttsttcgtcggccgtggcgtcctggtactgctggtactcggacaccaggtcgttcatgttgctctcggcctcggtgaactccatctcgtccatgccctcgcccgtgtaccagtgcaggaaggccttgcgccggaacatggccgtgaactgctcggagatgcgcttgaacagctcctggatggccgtgctgttgccgatgaaggtggccgacatcttcaggccgcggggcgggatgtcgcacacggccgtcttcacgttgttggggatccactccacgaagtagctgctgttcttgttctgcacgttgagcatctgctcgtccacctccttcatggacatgcggccccggaagatggcagccaccgtcaggtagcggccgtggcgcgggtcgcaggcggccatcatgttcttggagtcgaacatctgctgggtgagctcgggcaccgtgagcgcccggtactgctggctgccccggctggtcaggggcgcgaagccgggcatgaagaagtgcaggcgagggaagggcaccatgttcaccgccagcttgcgcaggtctgcgttcagctggcccgggaagcgcaggcaggtggtgaccccgctcatggtggccgacaccaggtggttgaggtccccgtaggtgggggtggtcagcttcagggtgcggaagcagatgtcatacagggcctcgttrtcaatgsagtaggtttcatctgtgttttccaccagctggtggaccgagagggtggcgttgtagggctccaccaccgtgtctgacaccttgggtgagggcatgacgctgaaggtgttcatgatgcggtctgggtactcttcccggatcttgctgatgagcagggtgcccatcccggaccccgtgccgccccccagagagtgggtcagctggaagccctggagacagtcacagctctctgactccttcctcaccacatccaggaccgagtcgaccagctcggctccctctgtgtagtggcccttggcccagttattcccggctccactctggcctgccagagggaaagtgaacattagacactaaaacataaggaatttcaaaatctgtcattttgactatggaggagaaggtaggactggtcttagactggcagattcttctcttttgaatactcttcttttacctgaagaaatatttttctatgtcagtgacctcaaaaacactggggatcataataaagtaagaagtaagtttagctcatctgaggctattgattgaggaagaggatagggttagaaaacttaattggttctgaaatacatacatttttaagaggcattctctttatactcaactacaattaaacaggcaaggtgaaggcagtgtgaccagcagagaaggtggcctcagcatctgtctagctctggtcataacctgtgcttttggcccctggctctttgaagtcctttcaagttgcctatagcctatgaagcctggcttgaagcttttccttgctctttcttccttccagtctgaggctgctctgcaatgggagggctgcagcagccctctgcaggctggcgttgatctgtgagccatgaccacccatggactgcatggagctaggccaggactcagggctgccgtggacacagtgtcaccttggcactgaacactaagaactgtgctttgcagggctgttaggaagaaggtgtgtcatttggccagttcccagtgatcatgactacataccgaacacgaagttgtctggtctgaagatctggccgaagggtccagacctracmgartccatsgtgccwggctccagatccaccaggatsgcccgaggtacatatttgttacctgcaggaaataagaactgactcaggcctgtgcttggggagggactcacagcagcattcaattccagcatctgagacaaaaggagaacaggagattttctgcttttaagaaaaaggaggtcctgagtgtgcttagccgtggcaaacaggcaggaatcttaggaaaccataaaacatgtttttccagcagttggcatttgaaatgaatatgcaagaagcatgcctttgtcacgtgcatgttcctgggacgtttcatctcccacatcatggaaagcaaggattcctgggcacacacatcccgctactcaccagcagcctcattgtagtacacgttgattctctccagctgcaartcactgtctccatggtaactgcctgtggggtcgatcccatgctcatcgctgatgacctcccaaaactgaaatgaaaaaagaaccacaccatggctctgcatcctgaatgtcactaaggatggccttgtcctcctcccatgtccttggaacaggggcttttgtggtcagacagttagtaagtgctagacagagagcaaagagctgcacctcctatttcctgcagcagccgctgctgaggggcttgaaaatccgcagagcatcggccatattatggggatagactgaaaggctgggaggggccctggaggaggaggggacannnnnnnnnnnnnnnnnnnncagcagatgcccttctagggagagggtggggagagtagagaagtggagaaggggtacagggaggctgtgtcaccccaggcagggctgaatgccattgcatccgggatgattgatgggtcgtggcaggaccaaggacagggggacccactctgtggctgcctccagggatcaagctctcttggcacagatcccaggcactcctgcaacagtgcaggtttaagccaccgatctacatgctggcactgaccaccggagggactgggcgaagggcagcaggagcctgggagggcacctgggcggcagtggaaggagctggccatcgtgagggcgctggctgcattgtgaatttgcggcggggaggctgggtgggcaacatggcggttctcaaagagaccacgtccttgtactggcgcccgcccccacccatgcaccagacccgctgctgcctcccacacagcggtcggtaattgcagcccccacccagcgcagtcacctgccgcctcggggactggcagcaagactatcgcgttgtatgtcatcatgtcaagacagtgcccgagcaagggaatttatctaacacccttgcctgtacgacccaaagggacgcctctgttacatctgccagtccagtgacactgcatgttttcattcaaaccgtagagaaaaatatacaaattaaattcacatgaagctagcgcaataaatatgaccgtasccccgacccaagtttctgagacaaatacacccaggggaatgccarccgcgtcccgcagaagggctgtgtcccagggaaatcgaaaggsccccgattaaacgcacacacagctgcggcgctgcgggcatcctggcgggtcatgcagcctcccggaccccgcccggcggcctcgccgcggaatgtgccacccggccagcccggggccgccgcggcctccagcccccgccccggccccagcccgcaccctcggtcccaaccccgggcccctccgtggcggtgagcccaccttggcgccgatctggttgccgcactggcccgcctggatgtgcacgatctcgcgcatggtgccggctgcggagcgggtggcgctggccctcggagcggtgcgcggcgtggaccggcgggctgggctgcgcagagacctgccgccgcccccccagctcagtcttttatatccggggacccgccctgcccggtgacgtcatgacgggcggggctgyggccgcgggggcggtgcggctgggactgcggcaccgcgagggggagccggggcgcggtgcgaggtgtgggggcgctcgccctattgctgctgccgctgggtctagggtgggcggccggcctcgcggtccggcggtgagtgcggtgcccgggcctcgggcccagccgcagccccctgcccgatccacgggcacgggcgacccctggcgctgggtcctccgctcacgccgcgatccccaccccgagccgcccactctggacccccgaggggggctggggaccgggggccccggaaccagggggaggggctgcctcggaacagggtcctcgcctcctaaggacgggaagaggcgtcgagtaccctttggagtagggggccggaaattgaagacccatttgcagtgggctctccagcgggtggcaaaggtttcccgcatcctgggcagggtcctggacgccgtttgtgggggtggggtgggcagcgtggagaggagtggggggccscggggagccgacgggcagctgcctgaaaggaatgccaggatggcggggtgggcggcctttcgcccctgcaggggaggaagatggcttggtcgggggcgggggttgggggggctatcaaagggctggatttgtcacatgtccgctttgggctcctgcgtccttgtaaaggccttttaaatgtggaaaattctgcgggtgtgtgtgtgtgtgtgtgtgtgtgtgtgtgtgtgtcagagaggaaagacaggaggaatatatctgccacgttgatgtgtcagctgatggccctgccccttacaccccttaggtcgcctgatcctcacagaagctgtcggagctaggctggccagttcggtagaccctaggcacggtggctgccgagcattgaaacgtaggtaatctgaactgagatgggctgttaagtgtgaagaacacactggcttttatgggctcagtaagttaaaataatgtgaaatatttcattactgattcttaaatattgatggtctatcaaaataatagtgttttggatacattgtgttaaatgacttgttttgaaattagaaaatgtaaaattacatacttggtttccatttgctgctcacttacgcatatttttgttgactaccaccggcttctggtaagcattattactaccccaatttcatagctccgaaagcgaggttgaaagacctgaccagccacaaagctaggaagggaaggaatctaaagcctttgtataaataaaaagcccaggtgagttttaaaggcttgggtgggctgtggtaaggacctgacttaattattcacaaagatggccctgcacggtggactaggtaacaggggcttggggactgcctttggttcccagcacattccaactatataatgatgataattacaggtgccttggagctggctttgtggtaggagatgagaagccatatatgaaagcacattgagtttatggagtaaaaatgccttggtaaaacccaaggtgatgggctgggcgcggtggctcacgcctgtaatcccagcactttgggaggcttaggcgggtggatcacgaggtcaggagatcgagaccatcctggctaacacggtgaaaccccgtctctactaaaaatacaaaaaaattagccgagcctggtggcaggcatctatagtcccagctactcgggaggctgaggcaggagaatggcgtgaacccgggaggcggagcttgcagtgagccgagatggcgccactgcactccagcccaggcgacagagccagactgcgtctcaataaaaaacaacaacaaaaaacccaagatgatgctgtcattcctaatgtgcaccctacctgccacctcaatagttggtctgtatcggaggtggaaactaaagccagatgtctgtgagtagcctcttaggccaagttaggtcttaatcaccccagctttaggaagcgcccagcatcctcccagatgtaggtaggcaggtgcctagtgcctcttctcagggtggggaca

SEQ ID NO: 95102 - DNA, 52299 bp, Homo sapiens
aggatctgaacattgagagtacacatggacacaaagaaggaaacaacagacactggggctacttgagggtggagggtaggaagagggagatcaaaaaactacctattgggtactacgcttattatctgggtgacaaaataatctgtgcaccaaacctgtgacatgcagtttacctatataataaacctgcacacgtacctctgaacctaaaataatttttttaaaaaaataaggtgaatttaaaaatatgtatattgatgggggtgaaacttagagaaaaattagagtcatgggactcatcccagcaaggtgggaatcttcaaatggttattaagaaatggaatgaataaaatggaaattgatggggttaaaacaaaggtcttaatacaacactgccaaaagttcggtggaccaaagggagcccctgctggtccctcaacattaaagggccaattttctgtatttgcccgattggagaaatcgtaaaagagaaagctgaccaacaattgcctgaggtaatgttgaggtggttaatgaagatatacaaagttccttggctcaattccctactgggaacacaaagtgtttttcaccagaggcttttttacaaaatgatcttgggtggagaagaaaagtttctggggctagaacacaaaaatgtaaagattgataggattatgaaagttaaaaagtttgtaaataaactttatataaagttgtgacacctttacttaaatgtttcatgaaaacggacattgtatctgaccagagcatgtttctcctacttagtactgcaaactagaaggcatttctagtaatggtaaatctgccatttaagcaatattaactggacatgctaaatgggagccagtaaattgctcaagccctcagagggtagagtagaagatggagtgctggtagggatgaaacctccacttgatagccctttgtggagtgtttactaggggtcatagcaaaggcctgtgagcacctcccaacaaccactactgggactgtggactacagaatttctacttgagaggcatttctgccttggaatgggacattaacagaagctatccctatgactggaggacataaaatgatcttgacacctaaaatacacatgctgtctggagtgatgtcagagaaacactctaacggggatagcagtgcccagaagagtacataataaaatgggaatggatcttgctacctgaggagtgcaaagaggatatactcatgagctgcgagcctctttctctcctaggactgatcctggaactggtgaggagttgctggataccatagtacctgacaaacagctctaacctaagagttgcttggcttgtggatggcagttccaaggtcatcaggcaacatcctgtttggaaggcattactctgattgaagaagagtcaagaaaacttttttgttttgagctctttataacttataatgattaagtgtatttttgtaagcaaaatttgtccttctctctatatgagttctcccaaatttgaaaactatttgtgttattttatggcaatatagttatgtacatatgttcaatatgaatgttttcttttgtaataggacacaattggagacacattattttaccaaggctttgactggaatggtctattttcagacatgatcaatctgcttggggatttgaagttgactgcagagagccaataaaaagcccatggaaagactggttccctaagaagtttcctgacccgtggtaagtaatgaatgtcactttctaacaggatcagaaatctcaagatattttgagacctcaagaagagagaaatttgtacaggtattataaatgcagtctaatggtgaatccttggctttgcttctggcgttgaggctttaaaacactggaataaaaaattctgatagttctagcaaagccaacttaaaaggagcctatatggctgatcactattcctgctacaatttattcaaataaccaggccaatataatgagacaaatttattttgcaaataaattggtcctagtataatttatccttggtagaaataagaaaactggagaaaaaaaaatcttagattctagccctgaccactgcttttgagtttttataatttgcctataatttggactaaatcctgaattatttcctggctacaagaagtctctaaaaaggaacttggttttaattttcttcatgatgcttttagttggctgcttactcgaataggctcctttcatttttgttctggcatacaaattctcttctgattgtaatccttgtgtggattgtatttctactattcaaattattgatgctatgtatcttttgttgttttacttccgagaaaactaaagtcatagtattctgaagactagagaaattcaacgaagcctgtcaatctcccttgtttgaaatcccaaggagtatgttggcaatgagaaaccaatatggcccagtgggatttcaaaggctctgggaccattgcaaaaaagaagggtgcgtgagactctacacatgaattagtggaatgtggaggacaaagcaacgccacctaggatgttaatccaccatgtggacttcccctgttctgggaaggcttctaagatttcccctctctctattgtttcttgtgtaaaagcatgtacttactgtaaatcctgcccttagatcaagacaactttgatgttattgtatttcaattgtcctacatgtcccttctgagtcaccctttccctgtggtatacaacccctgggtctgaggggtaatggcactgggatccaccatcttgtctcactgccgcctgagatgcagacagggcttctgtttttaagtctccattaaatgtttctttttgagaaacgttaatgtgtcagcctctttctttagcctctcagcttccttagactttggagcgtaggtctgtatagtcctgcttaccttgaaatagatgggttagggagaaggaacaccagggagacgttcgaattatttcacctaaaaatgtagagaagttttgtgaaacagtgcttaattaataaaaaggtatttcttgagagatggttctattcctactactggcaaaaatgtagatgaaagattgtttggcatgatgccaaatattaccctataaattacttcctaattgcaaagggaaaactataactttaccatagaaagaactgtctgtcaataatcaaatgatcaaatagcattgtcaacaaagagtcaaactttgtaaaatatttgaagagatttattccgagccaaatatgagtgatcatggcccacgacacagtccttgggagatcctgagaacatgtgctcagggtggttggggtgcaggttggttttatatattttagggaaatatgagacttcaatcaaatacatttaagaaatacattggttcagttcagaaagacaggacaacttgaagcaggggtggagctgggggggtaggcggggggaggttccaggttataggcagatttaaacattttctggctgacacttggttaagtttatctaaagacctggaaccaacagaaaggaaatgtctgggttaagattaaaggattgtggagaccaaagttcttattgtgcaaaggaagccttcaggtgagaacagaaaagcattctgttatctctctccttcagagagaagagattgtaaatgtttcttatcagacttaaggtctgtgttgatgttaacatcactgaggtataaagaggcatgtccaacccccacttcccatcatggcctgaagtagtctttcaggttaaatttaaattttagagtgccctagcctacgagaaagtccattcagatagttggggggaatttagaattttgtttttggtttacagcaagcttgtccaacctgctgcccacagaccacatgcaacccacaggccacatgcagctcaggacagctttgcatgcagcccaacataaatttgtaagctttcttaaaacgttatgaaattttcttgcgtttttgttttggtttgtagcttatcagttaacattagtgttagtgtattttatgtatagcccaagacaattctttttcttccagtgtggcccagggaagccaaaagattggacactgctggcttacaccatcaccaatagtgggacaaatctgatattaaatgcctcctaatgtaatacaatattaactacacagtatgacctttgaagtatccttatccaatgtttaatctgaactcctcaagcctctggtaacttgcaactgataggaaatacaaaatctagaggtacaaaataaataaaatcggacaatccagcattagggcattcttcatgacaactgcttggtatcttaaatttgtttaaaaagacagttattattgggaaaaatgaattagattaaaagctttagattaaaagaagccaaagaaagttaaagcccaacttcaatgggcaatcattcataggatcctggttcaaaaacaaactatttacaaaaggtattctggagacaactggacaactggagaaatgtaaatattctctggaccttaaataatagtagcgaataattgttaattttcattgatgtgataaaggttttataggaaatggttatataggaaaatgtccttgtaggagacatatagctaaagtattctgaactgaagtgtcttatctacaacctacagatctgagaaaaataaaaccaacaaccaaaacacacacacataggtacacatataaatatataaataaatatggaaaaatatttgaatctaggtgataatgatattgagaagaaattactcaggccgatagtacgagtatgggagtcctcagtgtaaaaagtgaagtagaggttcctcttcaaatggactttcctttccgtctaattaggaataaacagtaacttctcttaaaagcaaaatttattcaaagaactgtgctaacatattggaggccgaaacaatgaggttcgtgatcaactcagtatatcactggaggctatatgagtaagcagcaaactgtttctcataaatgcagaacgttggcgaactgacaaactgcgtatgccacccaggaggactgctgagggtagttacgatctaggcacaaatgtttcttatgattaggcataattgaagcctgtcagtaacaatatgaacctgtgatcaattaagcagctgaccaatcgttaccacctcctccctgctcctgttacccaaaaaataggaagggctgtggaagctctgtggctgcctttgctcacgagaagcagggagctctcttcttcttcccctggccctttccttaaaacagttccttttgtcttaagttatcatttctacgttcgtcccttcatttgatctcacaatgatggtctcaagcagtaacagtagtaactgctgtaacgatggtctcaagtagtaaccgtggcagttggccacactaacattctttgatatctgttggccgtaataaagaaatcaatgtactttgtgctcttagctgccacattttagcctagatatttgccctggcatgcttatactggtccaaggaagcattaggccatagcctgttttcttccttatctggaggtgtttttacctttctcagcattccacaagttgcttcctccttcctttgttctcctctgtctttgcctcttttggaaagttctaagttgctagccaatcaggacaagtacagaggtccccttccagccaatggaaaccggacacggtagtagggtgcacgtgtcaggttataaatgaccctgtctcctttatgcgtgtgtgctctcgtggcaagactactagcgagcggcaacctttctgcagaaagtaaactagccttgctaagagctcctttgtctcagtgttgatttttgcaacactgagcgcccgttcccaacatcagtaaggcttttctttttaatgaaaagcagccccaaatccttttctaagagcagcctgtgaagtcgagctgcaggcacagacaaacaagggggtagcttgcttgggtgaatggtggcaggaactaccgactagacatgtttaagatgagggctccatcttcgcttctctgccagccacgtgtacagtaagaaggggttacaataggcatatgggtgattttgtgcttttcgttcatcttttctgtgtttaaaatgttcagaataagaaattggaacaaaggagacatgaatagacaattcctaatcatctttaagagtccgctttgtgttttacttaccaccwccactttgaaggctttcttgcctataccaggacaaactcagctctttatcccttttccgaattttcctggtactttcactttgaatayagcgcttaattaacattctgccttgtacctaggactaacacastataaattcccagaagacaaagtaggggaatacaataacaggatatagaattttaacagctaaattagatgaatttatgggtgacctttattgggcaaaagaaaatgttaagttagtataagatttagtataagctaccatctcaaaactcagggtctcactggaagagaaagtgactccaggtagaattcctcagggagacattcacttccatcattcgctgaaccaggagctttggacagcctcggattgcaccsgcatatccaaggacaccacatcagcggacaagtcataaacagccttgggaatacgcggaaaggtcaaatttacctaaacaattaaattctcttttaaattttaaggaaacacaagtatgctttcgctttaggtagggcatttgagagcaaaatgtactaatactttgaatccgccaagcagacacgatctgggtttgaccgttctctccgggtaaaggtgaaggctgaccacgggggccgctctccctccaggccccagccacgccctctaacccaggttcccgtcctgcaccgcgccgcaagtccccccaccgttcagcgcaaccgggccctcccagccccgccgccgtccccctcccccgcccyggctctctttccgcgctgcggtcagcctcggcgtcccacagagagggccagaggtggaaacgcagaaaaccaaaccaggactatcagagattgcccggagaggggatgcgacccctccccaggtcgcagcgacggcgcacgcaagggtcacggagcatgcgttggctacccggcgccggggaccgctgccaccccgcctagcgcagcgccccgtccttccgcagcccaaccgcctcttcccgccccgccccatcccgcccacgggctccagtgggcgggaccagaggagtcccgcgttcggggagtatgtcaaggccgtgacccgtgyattattgtccgagtggccggaacgggagccaacatggcagcggggttcgggcgatgctgcagggtgagagggagcccagcggtgcggtggggctggaacatgggtattgtggtgtcggagcagggggccstgggccaaaaataggtgcggccgggaggagtgggaagtcgggctgaggaaggagccagcctaggggcccccaacctgctttcacgcctcctaccaccggacggaacgtagcctagcgtttmattttccgtatcctcccgtcaggcgaccccgttatagccggcatcctctctttagaatatcgtttttctttctctggtaaaccctccaaatatttaccgcgggaatcccacctttttccaaagtgaccccgtctctgtgtcagaaccacgggaaaaagaaaaatggagcagctactccttgaaatacttaatgtttaataagcttttcgttgtaacgtttccacgttgcttacgggaaaaaaaaaagtaaaaaaaaaacctgcagaattttatgtgaacttgtgtgtrtattctagtattggatcttaatagattctaaataagtttgtcactagatgaattttggtatcttaaatattcttgatatgttcacaccactgccatttagatgtcacttaaaattaagttaaagttatgtcttggaccaaaaaagctgcggttttagaataatcctaaagaattgctgcccatgttttgctggtgttatgcaagttaatgtgcagtgaaggcagaaattgggagatttcagctatttttaactcctacaccagaaaagcagatttctcaacctccaaggaaggatctaaaaaaaacctgatatagaaaacttacaccctttttctcttctttaacccataaaactgacactcttatattcccaagaaatgcacaaaagtgttcaattctagtggtgctgtttcgatatttggaatttcattgttctagacagagagcccgaagtaataaaaccaatagttatatagcattaggctttcaaaacattatcgtactttaatcgtccgaaaatacgcagtgagattagtcccattttttggttttgaacggaagctataagcagtttgtaaacctgtctacggccacaaatatggttgtggaacctagattcacattcagcaattataactccagatcccgtgctgtttctgttttctatttgcaaaccacctctctaattaactggctaactttgttatgtaattaacaggttgatgggcattgtattctggtaatagcaacctttgcactttgttccatgtaacatattttcctgaacagtcacatgtgaagtgactttttccctatttaaattccctcggttggccaggtgcggcggctcacggttgtgatcctagcaccttgggaggcctcggcgggttgatcacttaaggccaggagttcgagaccagcctggccaaagcagggaaaccctgtctttactaaaaataggaaaaattagctgggcatggtagcatatgcctgtaatcccaggaggctgagtctgcagtgagcggagatctctccaccgcactctagcctgggtgacagagggagactctgtcaaaaaaaaaaaaaaaaagtcyctcagtagaccatttaacctggtttgagttctgacttttgtgcatggtatttaaaaacgcatttataatagagtcaggttttttgttctgatttttgtggaatgttttcctttgttatggaacctagtgaccaattaggatactaacagaaagatcagtatagcaaggtggttaatagcatgcgctcttgatagtaaatgttagaatcctggttgcactaatagtagagtgactttgcctaatttagttgactttctgagccttcgtttcttcacatgcgaaagtggaataaaagtaatggcttaatcctagacttgacctgggattcagtgaattaacctgtgtaacgcgactgtaaatcagagtagatttggtctgtgactgctggacaataagcaccagagaaactgtttcacttttttttttttttttttttttkagacggagtcttgctctgtcacccaggctggaatgcaatggtgcagtctaggctcactgcaacctccgccttccgggttcaagcgattctcctgcctcagcgtcccgagtagctgggactacaggtgcgtgccaccacacctggctaatttttgtatttttagtagaaatggggtttcaccatgttggtcaggctggtctcaaacccctgacctcgtgatccgcccacctcagcctcccaaagtgctgggattacacgcatgagccaccccacctggcactgtttcactttcaaaataaaattaatgaagatgcaaagaaaatgcgagttttcatactctgtatgtttttattactgtagtatgaggtatgttatttggaaagcactgtttcaattacaaatatttgacactcttaattatattgtcaccttacatgtaggaattcgtcttttataagttgaaattgtcatctacaaagacagtttctttttacggattttgaaaaacataagaatttaaataaagaaactttagtatattcttcagctgctcttttctcttagtatctaagcttgttaaaattgctggatagttcaattaaaatcttttacagtgaaaattgtgtaattttgactgtcctgaaacctttactcaagaacaccattgtggttcccagtttggcagctttaataaatgcaaatttttacttttgtatccattaarctgtcatgaatataaaaatgggttgcaaaacaataatatatgtatatttgattgtttctttatatgttcctttgaagaaatatgactatatttcagatcctaagacaagtagtgtattagtagtttagaagagggatggcaaacgtgtttgtaaaggaacggatagtacatgtttttggctttgtgaaccagatggtctctgtggtaactacttagatctgctgtgaaagcggcaatagacagcatgatgtggctgcmctggtttggtgactccttgctcagaacattgtaagaatccctgtagacagcagaaaatacagaacatggttttatgctaatttgttttgttagagtggggtatcctaaaaaatgagatcctctgaggggaaggtttccagaggcatgcatgggaggctcacagtgacagggtatcaaagttgatggactaggcaactcttgaacacagtatgttcacttccagcctatcgttctccccaccccaactctccaaccattaatgtcctaggagcttgtaagatacccagaatagtggtcctacatctactactacccttgactgttgtttgtcctaaaccctccacttcagtagtataaataccactgactttattttcattactttttaaaaacatctcctctgtaataggaatttatataactgataattggcttatttaaattatgattgaaggcatttaaatagtgatgactttaaaaactatgagtatggtcaaaccagttgctgtactcacttatgattatcagtagtctcttatctgattaatgtttaacttatsaaatttattttaataaaagtgttctttacaggtcctgagaagtatttctcgttttcattggagatcacagcatacaaaagccaatcgacaacgtgaaccaggattaggatttagttttggtatatgttcggttctatcttttgactttaaacttatacatatgaagctttatatgtttgtttggaatatgtttgtaaataaacttaataatgtctttcaatgagtagaaccagtccactgtccacagatartttacaataactcacactccattcttcctgatctcattttcttcctcagtatactacactgtacattagatctgttttagcagcatacatacacttaaattccttcctttttttctgagtgtttagcccaaaataaatgagatttactgatatatatgaatagtcttcaacttacatatctgaatgccacaaatacattttaaaaacacttgttagattacaattctaggtgcctggtaataagctaaagcttgtttttgctataatatatccaaattgcaattttggtactattagatgaagttctcactcctgggaccagggagccatgattttttttcctctgccctctataaaatgaaaactacacacaaaaaatttgaaataatatctatctttggcattcttggccttctaaagtgcttcttcaaaatttttattttttctctagttaaaaaccatttactcaatttatttggtctcagaaaatagttaaaggcagctgcrataactcacagctaggtacaaatgacaatctcaaagctctccagagttattttttttattatttgttgtgttttttaaagatttttcccttttctttataaaggttttttttttttcttaccagaatttaatgaaatttttcttttctttttctttctttcttttttcttttttttttttttttttaagatgaggtttcattgtctcattatgttgcccaggccgatctygaactcctaggctcaagcagtcctcttatttcagcctcccaaagtgctgggattataggcatgagctactgcacccagaccaaatgaaaagtttctgtgtttttttttttttttyctgtgacttctagccaaagactggatgaaaattttytcttttcttttttttgagacagagtctcactctgtcacccaggctggtgtgcaagtggctcactgcaacctctacctcccaggatcaagcgattctcctgccccagcctcctgagtagctgggactacaggtgtgggtcatcatgcctggctaatttctatatttttagtagggatggggttttgccacgttggccaggctggtctcgaacagctgaagacaagtgatccacccacctctgcctcccaaagtgctgggattacaggcatgaaccactgtgcccaacctaaatgaaaattttttttcttttctctttctgtagccaaagactaaatgaaagttttcaagcastgtgaggatagccatttgggatggtggattttttttttttttttttttttttttgagactgagtcttgctctgttgctcaggctggattgcagtagctccatctgggctcattgcaacctctgcctcctgggttcaagcgattctcctgcctcagccacccaagtagctgagattacaggtgtgggccaccatacctggctaatttttatattattagtagatatgaggtttcgccatgttggcaacgctggtctcgaactcctggcctcaagtgatccacccgtcttgtcctcccaaagtgggattatgggcattagccagcatgcccagccagggtagtggatcatactgagataattagcattaatttggtatgattgcttgtcactttaaatttctctctcagtagtaagagacttgcaggagaaatctatggtggttcactgagtgacagaggatgagttagatataattgtttgggagggagattgtgaagttcaatacgggtctattccttgaaccagttgcatctggttctttatctgtaaagtggaaataatatctataacacagaatttctatgaagattaaattatatgctgtatttaaagcccctagcacttagtgactggatcaaagtagtttctcaataaataatacataatacatacttgtcatttttccttttttttttttttaagagacagggtttcactctgtcacccaagctggatgcaaccttgacctctggggctccatggattctctsgcctcagcttcctgagcagttaggacaataggtccatgtcaaccacacctagctgattttttaaatttttaaatgttttgttgagacaggatcttgctatattgctcaggctggccccaaactcctggcctcaaatggttcacctgcctcagcctcccaaaattctagaattataggcatgagctaccrtgcccagactttctctaccctctatctacctgcaagattgctatcaactggcaccaatcttagaagtaaagctgtgatagagagaacactggactgaaaytcttaagtatacttctgctaattcattgtgagactgatactagaatttccttactctgcattagtttatcaataaaaagagagatttggctgggcgcagtggctcgggcctgtaatcccagcactttgggaggccgaggtgggcggatcacgaggtcagaagatcgagatcctggtgaaaccccgtctctactaaaaatacaaaaaaaaaaattagccgggcgcggtggcaggcacctgtagtcccagctgctcaggaggctgagacaggagaatggcgtgaacccgggaggcggagcttgcagtgagcctagattgcgccactgcactccagtctgggcgacagagcgagactccgtctcaaaaaaaaaaaaaaaaaaaaaaaaaagagatttgatcttatgctcttcaattcagcaccagaattcagcttttakgtattgtttctcacatccccatacaaatgattactgtagtcttaaacattcctctgtgcatttgctctcatttttcttgcttgaaataccctattatctcttaaattttacctaatctttgacgttagatgcaaccacattaaaacacaaggataccatggatttgaaaagatgcagttagcaattgactcctctcctcaatcaagccaccatactaatttcattaattttaaaacaatcccttattttatgtaaacaaattgttggacaccatttattagcattgcagcaggattttatgttattatcttttgaaaaacctttctaccacttttaccagttgctttgtgctaatttataagcttgtctgagtttaaaggagctgtaagcctaggcatggtgtctcatgcttgtaatcccagcactttaggagaccacggcaggaggattgcttgaggccacgagttcaagaccagcctggcatcatagtgagaccctgtctctgtgaaaacaaaaaaaatgaaatagatagggtgaggtggctcccagcactttgggaggccaagatgggagaatcatttgagcccaggagttctagacccatttgggcaacatggcaaaaccctgtatctacaaaaattacaaaaattagccagatatggtggcatgtgcctgtgatcccagctagttgagaagctgtggtgggaagatcatttaaggccaggaggtcgaggctacagtgagtcgtaattgcaccactgcactccagcytgagtgacaaaatgagactgtctcaaaaaaaaaaagcaaaattatgatattgatattcttatatgacactttgaaataagttttattgctttatgtcactgagtgtgtttcatctatttcgttagattgattcttgtcgtcagggagatgtcttgtatattagtttcacttcagtgttagcaaacatttgataaattggcttaggaactaataataagttaaacgttttttatatcaccaattggaaaagaaaaactcacttgagctctacaggttaatatctattactcatttgtaaaagttaaaaatcttacctatttcctttagcatttgtattgacataggtttatttatattgtgtagtgaactcttgattagtcaaaaaatgcactgtagtctgagtttctgataatcaaggatttaagtccccacaataaatacacatttctacatactgacttcataggacatttttccttgttatccagttttaacttttctaaataattttcccttagagttcaccgaacagcagaaagaatttcaagctactgctcgtaaatttgccagagaggaaatcatcccagtggctgcagaayatgataaaactggtgaagtaggtatayacattttaaagagggaaaaatcttttacattttttacaagattatgtaatcaaactatctggatttcaaaatatattttaactcagttctttttcttctagtatccagtccccctaaytagaagagcctgggaacttggtttaatgaacacacacattccagagaactgtggtaagctttctttatatttttaatactggaatgcatatgagtamgaaaaattgtggaactctactcagtcatttttttcaaatatttcttgccattaaatgactttctacctttgtcttcctgctcagactacagtgtttgcccacttttggaagcttgcactctatacctagatgcrtttttccttcttctaactggttccaaccttaacttgcacctaaaccttggtaacttccgtttctagagttggtcaatttgttgtgttttattcctatcttctatattacattttattgagtcttttttgtgaaccatgattcttttcctcagacccagttttagagttgaattgagttttaacaaaatcaagttagaacaggaatacaggttcaaattacaaatagtaaaataattttttgaaaattttagagctttaagaaagtataatttcttattgtgccagccagaacacatgtagatattatattgcaaatttccttttaaaacaaattttggtcatattgaaagcaattaaaatagtttacctttatttctattgtgatgtactacatattacaatgtgttgaaacattttgatactgtaggaggtcttggacttggaacttttgatgcttgtttaattagtgaagaattggcttatggatrtacaggggttcagactgctattgaaggaaattctttgggggtaagtgacttagaaaattaactacctaactsagctcttgttaatgagatagttactcctgaagaagttgratttttagaagaaaaaaaaaggaaagtcagttactactaggtaaggttagtgggtacacacagttttctttaaagaggaacacaagattcagcagtgaagcctggagttctgatttcgaggcttgataactctggccttgtctctagtactcggagttctgactgtcctttggaggaaactgtatactttggctgcagcttcagtggcaattcttaggtaaagccaagggctaaatccagaattcaggagcaggattgggatggtttgctgccactatggcagtactgaaatttagcaagcaattcttttttttctcactctgtcgcccaggctggagtgtagtagcgcgatcttggctcactgcaacctgcacctcctgggttcaagcaattctcctgcctcagcctcctgagtagctgggattacaagtgcgcaccaccacgcccagctaatttttgtatttttttttttttttttttttgagacggagtctcactctgttgcccaggctggagtgcagtggcgcgatctcagctcactgcaagctccgcctcccaggttcacgccattctcctgtctcagcctcccaagtaactgggactacaggcgcccgccaccatgcccggctaattttttttttttttttttgtatttttagtagagacggggtgtcaccctgttggccaggatggtctctatctcttgacctcgtaatccgcccacctcggcctcccaaagtgctgggattacaggcgtgagccactgcgcccggcctaacaagcaattcttaggcctgatcatacatactgtgtcacatattctaaacataattttttattagtgcatttcactatagtagattttcacagattataatgccacaggtcctacatataacctaattttatgaaaatacttagattagcagatttatttcctcattctaacttagaggcaaggtataggccagttctttggacttacctgttaggtgaaaaatagttattttttcattttgaattatagcatctctgaatttacatatccaataaaaatgacttgattttttaatgtcaattttcttcggtagcaaatgcctattattattgctggaaatgatcaacaaaagaagaagtatttggggagaatgactgaggagccattgatgtgtgtgagtatgtgtaactgccgctttatttcacacttaagaagggaacaaaggtgctatttctccttttcagtctatatgtatatattgggatatttagcattgaaacaaaacttagcaacatattattacaatgatgtgtcaaggatgccaagaaagtatcataataggccgagggcaatggctcgcacctgtaatcccagcactttgggaggcggaggcgggcagattacttgaggttaggagttcacagcctggctaacgtggtgaaaccccatctctactgaaaatacaaaaattaaccaggcgtgatggcgcctgcctataatcccagctgctcaggaggctgaggcataagaatcgcttgaacccgaaaagtggaagatgcagtgagcagagatcacaccactgcactgctacctgggcgacagagtgagtgagaccctgtctcaaaaaaaaaaaaaaaaaaaaaggtgtcatcataattttgttgcttatttccaggagaagagagatctacttgtgatgtttttgggatgtcaaaaagtgtcataataatcctcttacttcaggagagagagctctatttagtggagcattctacactttaagaactgagtcattgtgtcaggaagttcagattgaatgtagggcaatgtgtgtttgaactagtagtgttttgaattagtaaaaaattaatgttggctggtcgtggtggctcacgcctgtaatcccagcactttgagagtctgaggcaggtggatcacctgaggttaggagttcgagaccagcctagccaaaatggagaaaccccatctctactaaaaatacaaaaattagctggatgtggtggcgcttgccagctacttgggaggctgaggcatgagaatctcttgaacctgggaggcagaggttgctgagtaaagatggcggcactgcactccagcctgggcaacagagtgagactctgtctcaaaaaaaaaaaaaaagcaattaatgtgggctgggcatagtggctcacacctgtaatgtcagcactttgagaggctaaggcaggagaactgcttgagyccgggagttcaagaccagcctgggtaacacagtgagaccctgtctctaaataaataaataaatgaataaataaataaaaattaatgtgaacctgtaactgaagaaatagcaacttatttgttgaatgactgaatgacttgggaagaatagttgtagagtttatttaaacctctgaaagcaactcaacaaatttttaaattagatttttttaacaagataaatacacacacagacatacacacacacacacacacacacacacacacacacacacgctctattctgaaactgttgtttacctaaggatttttacttcttgtttactcaaacatatttcaatctaaggtgtggttgttatactgaaatacagtagatgtattagttttgagctaatgatgagaattcatcttaaagaacagaaaataatatttgaaaataaatgttttttatttcagatacctaaaatttcaagcaaactgtttaataaaggaatttgtacatatttgctaggaaatttgcaattttttttaacaattgagaggttagctaaacattctcactattgtctataagaactgtgtgaaacgtctagattgttctcctgtagcatatacagtcagctctccatatccatgagggaatagtttaggacmkgttgccctccatatcaaaatttttggttgccaagtctgttatacaaaatgtacagttagccctttgtatctgtgggttttgctccacagttggttaaattccaaaattcgtggatgccaaaggcaaacttttaaaaaattaaaattttataacttttctaattataaaatactgagtatagaaaatttagaaatgttttaagtagaayaaaaatatctgtaatccctcagatatggagttaattagtattacttccttattgtagtgcctaccacatttttaaatatgtaattgtgtttttaacagttagcccccattatatacatgtagttttatgtacatctttatttaacaacatgaacattttcttatgccttccttctttttacatgctgtaacartactgcataatttgctatctaatggatatgctataaattgtttcacttttctgtactgttgaatgtttaaactccttgggtttttactttggaaaataatgttatggtaaaaaataatacagaaaaaaaataaataaaaatgatcaaataagaagccaagaacaggccaggcatggtggctcatgcctgtaatcttaacactttgggaagccaaggcaggaggatcgcttgaggccaggagttcaagaccagcctggacaacgttgagagactgccaccacacacacacacaaattatatatatatatatatatatatatatatatatatatatatatatatatatatatatrwgaaaccaaaaagaagaaaagaagacaaaaacaactctgaggaaccagtagtgacaagccattttgtatagaaaaaaacaggctcatttacttcacaggctctaaaaacttcactgtattatgaaacagacagatgtctaatagcatatttcagggaaaaaaataccttaaaggtggttaaaacaaaattttggtacttaaaaggggcatcttttatggacaactccttaatttgtcatgatgctgaatacatcaaatctccaggtagcagagtaatctagttcagttaacttgagtgacacctgaatcccctctacagaatccctgtcaaaagaccatctggctgacatgtttttatacctcaggtgcctgggaatcaacaccttctgaaacagcatcatttgcgagcatctgttatcattagaaaaatattttggattacatratgcttaagcacagaacctgtcatttttttttttataattttaccagttcatactgtaataggtgttcaataaatgttagagtgatttcactgtacttttctttggctatattgcccttcagatgtttgagtatagttatatttatttatttatttattttttgagayggagtctcgctctgttgcccaggtcggagtgcagtggtgtgatcttggcccactgcaacctctgcctcccaggttcaagcgattctcctgcctyagcctcccaagcagctgggactacaggtgcgtgccaccacgcctgsctaattttttgtatgtttrgtagagacaagatttcactgtgttagccaggatggtctctatctcctgacctcatgatctgcccaccttggcctcccaakgtgctggaattacaggtgtgagccaccatgcccagccaagtattgttattattttttttttctgaaatggagtctcgctctgttgcctaggctggagtgcagtggcaccatctcggctcactgcaacctccacctcccaggttcaagcaattcttcctcagcctcccaagtagctgggattacaggcgcccgccaccaagcctggctaagtttttgtatttttagtagagacagggtttcaccatgttggccaggctggtctcgaactcctaacctcaggtgacccacctgcctcggcctcccaaagtgctgggattacaaacctgaagcctcagccaccacgcccggccctaagtaatcatttctagtgcccctatatatgcttactactttgaattaaaatgtatatagtttctttcttttttgttgtatatttttaaaaaataaattgacatgggttctcggcatgttgaccaggctggtcttgaactcctggtctcaagcgatcctcccatctcagcctcacaaaatgctaggattacaggtggggggccaccatgctcggcccagtttctttcttctttggactgtaagtaccttaagggcaagtaacttgtttctttagtatccacagtaccggccactcttgaattaacttgcactaacacttgccttctaccacccccttttatccattactgcttgtgtcttgtcactcctctgtttaagagctctaagaggctcccctgtttctaccagataaaattttaaatttgtaatgtgatataaaagattctcgtcgaccatttccttcctttctttccagactcatgtcttaccattcccttacatgcacagaatttacatactgtggaactctggtactttcagcattagaaacactgggtaactctgtttcttatcttagtgtcatagcatatgccattacttgtacctggaatgcatattcttcctctttttccctcctcgcaaagaagccattttcctttttgagacttaatttaaacatcctctgccctgggaaactagtttctcaagccccttgtctgactttcacacatagagttgcagtatagttatttatcttcactgttacattgtgaaaatctctaggactgaatgtcttttacctctggtttccccatatcctaatttacatcgtggtrcatagtagatattcaatacatgtttgcatgaatgaatacatgtgaaattgaatttaaygaacttgtttaaagctatctaacattttcactttttattaaatatatgatttgttgatatacctatgcctaatttgaattatatattaagtgtttttaggccaggcactgtggctcatacctgtagtcccagcactttgggaggctgaggcagaggattgcctgagcccaggaggttgagaccagcctaggcaacacagtgagatgccatgtctacaaaaaatttaaaattagctgggcatggtgatgtgtgcttgcagtctcagctattatacacgggaggctgaggcgggaggatttcctgagtccaggaagccaagactgcattgagcctctgcattccagcctgggcaagagagtgagaccctgtctcttacaaacaaaacagaaaagtttttacatttgagtggtttctttgattttgtaagaacattttaattttagatatttaaaaatatttaaaatacagcttaaaaaataaaacaatcctgtttccaaacagtcaaaatttaatcactaacatttaatttcatttctcttgtttttatatattcaaggcttattgtgtaacagaacctggagcaggctctgatgtagctggtataaagaccaaagcagaaaagaaaggagatgagtatattattaatggtcagaagatgtggataaccaacggaggaaaagctaattggtatgttgttcaaaacatctttgtatattttttcttaattgttttatcttcaaatctctctttctttctgtatatttttaaaccactacagttaaggtatgtttgtggaactggaaggcctaaaggagattataaacagttcagtgattttcaaaaactaattttaagcccctgcactgttttttcaaattaactctcagaagtttaatgtgtaaaataaaatacaaatgcgtgctctgtttgaatctgattaggaaggctagcactctgtctacttggcttattatctccactcctcatctcctataccagccgctccttggaatccctaaaaccctaaggaaaaaggagaacctttggtatagtgcctgtctccagatgtcagaaataaacagagtcagtcttaaaacaggttatctattagagaagacagaatttgactttaataaaatctgaaattttctaatatatggtcaaaaaatatgaagttcaacaaaggatcaaaaataatttgtataaatataaaatactaaaaaaaaacactcgattatttgttgataaaagatgaggaaagttcaataactgttaagttcaataagaatcaatagtatgagcctttaaaaagccaatgtaattttaagccaaagtaatagaagtacagcatcaaatagagaaaaaatggtgacagttctggkcaacacattttaaaacatgtattgaaaaacttgactaaatctagaagcatgtaagtatcttgcattaggaggagcctacaaaacatgttctgaaaagcaaagccttggttattttggaagaatcttgaagtttttcaaatattattacacagaaagatgatcaggcttatatgtttacttcaggatgccagcttagaattaatgagtgaaagttagaaaaatgtagaatttagcttaacataaggacaggctttctatcagcagtgctgttaagttgtcatgggaaatactgtatttacccatcactacaagtatatagagagtttctagaataactttttattgattggaataatgtactaaatgacctgtctctctttgtaaaaaattcagattcaatatatttgtgtgccatatactacagttttctagcaaataaaacatcattttttttcagagtgagcctactaaaaagttacttagattaaacatatcagtcaattccttatgagcatcctaaatatattcagtattatggagtgctatatctttacctttaaccaattcctggtaatatcagcaactaataaaaagtgaagaaactattaaaatttaacaagttgagagaaatctaacaatgcagtttgaagttttcgtaattttaaaaacggattagccaggtgcaatcactcacgtctacaatcccagcagttttggaggctgaggcaggaggattgcttgagcccaggggttcaagaccagcttgggcaacataacgagaccccatctttacaaaattaaaacaaaaagaaagaactgattacaactgttcactgttcatatagtaaggcaaattaggtaatatatgaaaccagataacaatttttacgattttgttactattattaaataaaactatagaatgagtggtaatgtattggttttaaccaaagaaaataagtttgtgttgtttagggaagaatatacctttttaaaagaatttttcgtgtaccaggatatatagaacatgaattagacagatgcttggatatttgcatttttttcttatgttgcacttcaagatctttctgagaaattcttctgtaggaaaaaatcagcaaatattcataataactcagctataacaaaaacactgacttgctgcataaagaaacagtagttggaacatatggrtctccattttatttatttatttttttgagaacatctgccctttaatttgcatttaaaatcagtttctttaaatactttagttacaagttctgaatagtgaagacagagtagtagatgctgcaggcactcagtattggctcccaccccttcccccctccccacccccaggcctcacttcttggctcaagatacaaaaaggcactctctactggccctagtgtcaaatgtcagcagcctcwggcctggatgcagttggatacaaagccatgaatcccagtagctccaaggaattccaatgattgtgcccagatccaccggcaacacatcttagaaatgacctcatccattacaccactatctactaacaccctcagggtggtttcctaccccagtccacgtcctccaaatctgtgtcctgcagaggaagagacaaggccccactataacgcaggaaggaacaagaactgcctcctcagcccacgggcttacagcaacttacttgaaaagctcaaggcaatctgagtctagaggagacctcccttccctaatctctaccaggctctggcccttcttcgggactacgcttggttccactgccatgatgtgctagaatctgctctaagtaagaacaaggtgctagaatgaggcccagcaaccaggaaagggttgctacagccccagctgtgtgagattgtgccaagatgagtcttcttggtgtgagcctatgatggagagcgtgagggcagacctgggctctccttctatgatgattacaacacgtgacctcagggaacctctgctctytcctcccattcacacacccagatcccctggcctgtgcttcctggtagaggtagaagaggcatcttgaagtcaatgacaatggagaatgaaggtgccattgaagaaggaaagcagcacctctttgcctgtgttcaatccctccatacaagtggaatcgagaatgtgcacagccaggacagaggctgctctgagcttgggaggcacagcatcctcctagatgtctctgcagaacaaactttcaaaagataggaacttaatcacatggtcctcgggggtttctctatagtataccagcactagggagaagcaaaatcatctttgcagagagctgatggaagaaaggcaggaatatgaatgagcatccattaaggctctctctcaagcctaaggaattaagatattcgagggtatgagacaggtgcagagagggagagagccaggcaggaacaccaagaaaaaagctgtgactgctggttacatagtgctctgcttccttgcktgaggccaacagcatgtgcctgtcaccaggctaacctgggacccatgaggggacagggagaagactggttttcagttcctgcatgatcaatttgtagggtgtgtgggttcctcctaaagatcaaagaggaggactctgggatcctctaccgctgccttgattttgcggaggaaagtcacagcctctctgccatcaatcagccggtgatcataggtcagtgccacgtacatcatgggctgcacctctaccttgcctcctatagccactggcttgtcaaagatgccatgcatccccaggatggcagacaggggggttgataatgggtgttcaaagagtgagccaaaaacacctccattgctaatggtgaaggtaccrccatccatatcttcaatggcaaattcattctttcgggccttctctcccagttcagtgatggtctgttcaatatctgcataattcatagcttccacattcctgatgactggaaccaccagaccctgtggggkggccactgcaacactgatgtcaatataatccctatataccacctctttggttatatcatcaatcactgcgtttacaacaggctgttcctgcaaggcaaaggctgaggccttcacagatgccgacatgaagcctagtttgaggttatgtttcttcaaaaaagcctctttgtgccgagccctcatyttctggatgttactcacatcaatctcattaaaaattgtcagcattggcacatgtattctgggcctccttcagacgctgagcaatgcaytgccgcatcctgttcattttctccygatgttctgaatgcagacctttgccagctcctggctcagctagtggtgggacagcagtgggttttactgcagacacasgtttgctagaaggaggytgtgagggcgagggcactggtggcatcgagtgggtatgggtgctgcayggggaggaactgccgctgctataggttctgcttttggggctgcagcagcaggagcttcagccggcttggccttagcaggagcagcaccagttttcctgagtgtgaaaagcggagtgcctccttcgacttttcccccatcaggtacgaaaagagcttcaatcaygccatttgctggtgatggaacctgcaccaatgtcttgtcagtttcaatctcacaaaccacttcatcttctgcaactgtgtctccaacagctttctcccacctgacatctccctctgtgacagrttctgcaaacgctggggttttgactgtaaccaagtcatmcttgcatacagytgtagttctgaaraagcgaacactgaagacactgttgttaatgacaaccttcctgctgttagggtaacctggtccctggcataaggagaccccaggcagggaaygtctccctagagggcagttccccttctggaaggcagagagcgagtggctgaacgcccgggacacagtgggaccgggacagcatcacggcggccgggtctccgttttatattattccttttcacaggcagctctatttgccctccttttcaagatagcatgccccttaaagaataaaattagttttgggaaagaaaaagtgccagtttcaacaggcatagactgtcttgttgtaataataatactataccaggaatttttacttgcaactcatattactaaaagaaagttaaatagcatactatagtccctccttatccttgcaggatacattccaggacccctaatggatgcctgaaacctcagaaataccaaaccctgtatatactatgtttttttcctacacatatatacttattataaagtttaatctataaagtgggcccagcaagagattaacaacaactaataaaatagaactataacaatgtattgtaataagttatgtaaatgtaggccaggcatggtggctcacacctgtaatcccagcactttagaaggcccacgtgggaagatcccttgagtccaagagtttgagaccagcctgggaaaggtagtgagacttcatccctacaaaaaataaacaaaaaattagctaggcatggtggcacatgcccatagtaccagtgactcagaagaggtggaaggatggcttgagctggggaagtcgagactgcagtgagccaagatcatgccactgtactccagcctgcgcaacagagtgagatcttgtctaaaaaaaaaaagttatgtaaatgtcctctttgtctttcaaaatatcatatatatactgtrctgcgggtaactgaaaccacagaaagtgaaaccccatggaatgggggagggcctactgtgttattaagacatagacctcaaatactagctcttccatatactaggtacgtgactaggcaagtttttaaacctgattatttatttcctcatttgtaaaatgtaggtaataataattgggattgttaagagaattaactgagagagcaatcaccatgtgttatttgccgatattatcaccattatccggtatgtgtatctcttaggtattttttattggcacgttctgatccagatcctaaagctcctgctaataaagcctttactggattcattgtggaagcagataccccaggaattcagattgggagaaaggtaaagtatttattaatgattagggccccaaatattattttaattataaattgcaaaattacttaactttcctttaataaaaacatttgtttgtattaagttggagtaaaaataaagctatgttttgatgatattagatcaaatagtctatatactactgaagattttgtgaacagtcatttcaagtcattttgaaagagtagtaccaacctgtggagaaggctaataacagctgtgaggaataatgaagtaaaatcaagctatcatttatattacctgaccaataataagaattctggatatttcaagggactttcccactcttttccccattggatcctcacagcaaccttttggtaggataagtggcattatgcccattttacagataaaaacaatgtgacataactgagattttactaggtcatacaacactaagaaaaaagtctatgcctgaaaagagtgtagaaaatagcaaatagccttgaatatggaaaggcaagaaaatcttacttaaataagaaaaggtaatttaacatatttgaaaaggtttgtattctgaatatgtggagataaatttggcatttaaagtagactaaagagaaaagagtttaaaattttataaatcacaatttaaaattataaattttataaagaaggaaagaaatgaagtcaataaagtaattttttttttttttttttgagacagcgtctcgctctgttgcccaggctggagtgcagtggcaggatctcagctcactgcaacctctgcctcctgggctcaaacaatcatcccacctcagcctcctgagtggctaggattattggcatgcaccaccacacctggctaatttttgtattttttgtagagacagggttgtgctgtgttgcccaggctggtctcagactcctgggctcaagcaatcctcccaccttggccccctaaagtgctgggattacaggcatgagccactgcgcccaaccaaagtcccaaagttagaggcagagttgaaatcaatatgaaggtatcctaggaccttacccagtatagtttctgatactgtattgtgctatattttcaatcagatattaaaggtagactgcacttgacaaaacagatgatactgttgtatgtaacaaaatataagaattaaaaattattgtgcttttcccaagaaattgttttttatttgtataacagatcatgtttctgtcttagggatagttgctagcaaacttggccaaatgtatggcccatctttagaaagtataaaggacctaacagcttatactttttttagtagtaaactcactcctgattttatcttgctatttctagtttttttctttgcctaattttctcacttaaaaaaaaatctacttcaataaatatttatgtagtgcatactatatacagtattctakctattagggatacagtatggatcaaaatagacaaaaatccctggccttaggtaaattactttctggtgagtgatagagataattatattgtgtatatttaagcctccttaaatctttattgaaacaaatggatatttacaaatttgtgaaatttaatgttttcaggccaggtttggtggttcatgactgtaatcctagcactttgggaggttgaggtgggagaactatttgaacccaggagttcaggaccagcctgggcaacatattgagactttacctctacaaaaaaatttgaaaattagccagtggcagtggcgcacacctgtagtcccagctacttggaaggctgaagtgggaggatcacctaagcccaggaagtcaaggctgcagtgagccatgctcctgttgctgtctgtactgcagcctggatgacagagtgagacctaatgttttcaaatcttttgtgttttagaaattatatggtttgagatgagcccaggaagcattttggttttaaatgttgtggggtttgggataaatctggtagggtgttttctcattatatatgcatggtggtccaagattctagtttattaacttttaaagacaaaataaagggatgttggcttctttctaggtcaaactatcgttattatttcttcaaactcagaagcagactattaaaaccagcaaattaaagggttagtttatagctctttgtttccattgctcctgtttcttattctgcttattaaacatgagatcaagtttttttccttattaagagttatgtctgcaacttcctctcatgatttagcataacactaatagtcatatacaaagagaaagagaaataaaaaataaagcaaatgtatcaaaatgttaacaattggtgaatctattatagatgaagggtgtataagtacttacatgcctgttacaactcctccattggtttgaaaatttttaaaacaaaaagttgagggaatgtagctagtttagtagtttcttataaagtcaaacatacacttatcacataaccagtgcccttaaataaatacccaagagaaatgaaaataaagacctatatacaaatgtttattgtaattttattaatgattgctaaaaaggaggggagtatccgtcaactagtgaaaagataatggatatatggtacatccaagagtgggatactacttagcagtaaaataaatgaattattgatcatgcagcaacatggatgaatctcagaagcactatactaagtgaaaagtcagacacagaaagcggactttattatttcacttaaatgacattctggaaaaggaaagactacgcggagagaaatcacacagtggttgccaggggataagtgtagaataaggaaattgactataaagggagaacaaggtaactttttggggttctaaagtactctgtatcttgagcatggtggtggttacacacatatacatttgtcagagctattagaaatgtatacataaaaatggtgacttttctacatgtaaattatacctcagtaaacctaattttaacaagagtcaaaggaaaacaaaatcaatttttattcagtagattattttactagctctattaagattaaaggtctcaaatcagattgtgtttactaaatgttttttctgacatggtaaaatagatagctttcaaacatataatgagatttgtctttgttgataagatgtacttgtagacctttagactagtgttggtttcaaaatttgtgaaacattgttttagattatggttggcaaatttttttgtaaagatccaaattataaatatttcaggctttgcaggccatatctctgtcacaactactcagttctgccattgtagyaagaaagtaactgtagatgatatatgaacaaataggcgtgactgtattccaatcaggctttctttgcaaaacaggcattgcagactacagtttgttgatccctgttttaggtaattgcagaaagtcatgaaacagtgattaaagcaaaaattgatgctggctcaaaaaaaattccttaaaatatatcaattttcttattaggaattaaacatgggccagcgaygttcagatactagaggaattgtcttcgaagatgtgaaagtgcctaaagaaaatgttttaattggtgacrgagctggtttcaaagttgcaatgggagcttttgataaaaccagacctgtagtaagtaatatgggttcataatctttataggatcttttatttattacattaaataagtatttttactttaaaattgtatgttcagtgtgtttctctttttaatatctgcttattttattaaggatataggaaaaatactgttacttttctttcttttttttttttttttttgagacagagtctcactctgtcaccaggatggagtgcagtggtgcaatctcagctcattgcaaccttcacgtcctgggttcaagagattctcctgccttagcctcatgagtagctgggactacaggtgcacaccactctgcccagctaatttttgtatttttagtagagatggggtttcatgatgttggccaggatggtctcgatctcttgacctcgtgatctgcctacctcggcctcccaaagtgctgggattacaggcgtgagccaccgcgcctgaccatattgttacttttcttaattttttaaataattcttcaagttttcttactatacattatagaaattattttagcaactgcaaaattactgtagttggtgctagatttagagaggcagtccaccctaaatatgatcatcctgttaatatgtactcattttctgtttttactcattaagaacatttcccctagtaagatttctcttgttaaacaaaagcaatgacttttttctagagtatgatactatgcctaacaaatgcctcttactacctttaattaacaaataatataaacttacgtgcctattccctgttccccaccagtttcttgttgctgtacatcaccttctctttgtacactccctaacatagacacttaggcagatattgtgtgttttaaagataacatgaacttttgctttataatatcttaaaatactaggtagctgctggtgctgttggattagcacaaagagctttggatgaagctacyaagtatgccctggaaaggaaaactttcggaaagctacttgtagaggtaattttaatactgcttgctttgttcaaatgtaaagacactcattttcatttaatatttagaaatgatttttaaaccacaaactaatcaatttctacyttgatagcaagaagataatgtggttttatcaagatgagtttcaaagacatttctttttagagtgtgccactattggttacttctgaacctgacactgtgctatgcatttttttttttttttgagatggagtctcgctctgttgctcaggctagagtgcagtggcacaatctcggttcaccacagtctccgcctcccgagttcgagtaattctcctgcctcagcctcccaagtagtgggaactacaggtgcgcaccactatgcctggctaatttttgtatttttagtagagatggggtttcactatgttggccaggctggtctcgatctgcccgcctcagcctcccatagtgctgggattacaggcatgagccactgggcccggccttgtgctatgcattttaaatatattttctagccgggcgcggtggatcacgcctgtaatcccagcactttgggaggctgaggcgggcggatcatgaggtcaggagatcaagaccatcctggctaacacggtgaaaccccgtctctactaaaaatacaaaaattagccgagcatggtggtgggcgcctgtagtcccagctactcgggaggctgaggcaggaggatggcgtgaacccaggaggcagagcttgcagtgagccaagatcacgccactgcactccagcctgggcgacagagtgagactccgtctcaaaaaagaaaatatatatatattttctgattctctcagtaacccttttttgggtggtgttatctcttttaaggatcaagaaactgaagctcagaggtattaaatgatttgtccaaggccacacaatttataagtcacagatccaggatccttgcttttttttttttgcggggggtgggagacaaagtcttgctctgtcgtccaagctgaagtacagtggcatgatctgggctcactgaaacccccacctcctgtgttcaagtgattctcctgcctcagcctcccgagtcgctgggactacaggcacacaccaccacacccagcaaattttgatatttttagtagagatggggttcccttatgttggccaggctggtgttgaactcctggcctcaagtgatctgcctgcctcggcctcccaaagtgctaggattacagrcctgaaccactgcgcctggcctatgttatactcttaattcttgttacttcccatgtcctcttgagtatcagataattttagtactataaagagtcgtgtcttccatgaatttccagggtaattcttaactcttacccctttaaatattgatgctcccccattatctgtattctttcctgcaactcactatgagttgtatagtgaacctcctatttctctttttttttttttttttgagacagggtcttggttgcccaaatgcgagtgcaatggtgcagtcatggcttattgcagcctcttgggatcaagcaatcctcccacctcagcctcctaaataactggaactataggggcacactaccatgcctgcctaatttttttatttttgtagagatgrggtctcactatgttgcccagactggtctcaaacacctgagctcaagcaatctttccacctcagccccccatgagcctcctattcctatctccatttgtcagtggttctcaaactatttgtggtgaaagaccagtttgttttaatttccagttaatgtggaccattatttttgtaaaatataagaatgtcacaacaatgttaaattgctgtaaaagtgtctaaatgcttattctcatcttctgtaccatcaaccagtaacagtttgtgaattggcactgtggacaaacttggattagcactgctctgtgtcccttaaccttagtttcataatgtatctttctacactatattctagataattttttcagatctgctttctagttctcttatcttgtgcctaatctatttaatctgttgattttttattaatgactacttttcatttccagaagttatatttggttttttccattataccttctgttcaacatcataccgccttttccttttttctcattaatcatgtaaaaattcttcatttataatcaatttcagatttttttgttatcttcaattctttgggtgctaatctttcaaggtgtattgtgtcttctaactcttttatggtcaattattttgcttttattttttatttgtaaacaacttacctgcaggaagtactctatttctcagagcattatggaagcattttagaaattggcttttgtacttttttggcacttttgttaggtactccagagatttcaccattctaagagctgttattttacattaatttcttgacttggagaatcctgtatcacagagctcgtacattgatctcacacattaagaaactccgtacattccagtctgggcaacagtgtgagaccctgtctcaaaacaacaacaataacaaaagtccttttttttcttgttctttttttaaccctcctgggcaagagatcagcttctttgtggccctcctatgctgatgagcccagacttttaattgccyctttggaaagcaaagcttttacatgcagtgattctcagttttagccccttagattgttcatgctcacatcgaaatctcctgttcttatgtgtttcttaaaactctggttcctatcctgctgagcccaaatctgagtctgatttttcttttcctccatgttatctcttctcaggatttaaattcctttttagaggcacttagagatttctgtttctttcctatgagctttttttttttcttaaccaagtatttctttgttaactccttcatgttgccagarctacatatgtacattttactaaatgttagtttatcttattcataaacaaatttcaacctaatgcttttcagtgaagatctgtcatcgtcttccaggtcctccttacccaagtatctgatgataactgtatttttggctttcaactcaatatagaatcttctccttttatgttctctttcttataaattctaaagatttttttcttattaaatattgaaaaatcttagtttttccttactgcttaactcaaaatagtcttttatcatttgatttctactgaagatttgcttatcttttaagcactctgcaaaatgctgatagcttcttttttttttttttttttgagacagggtctcactctattgcccaggctggagtgcaatggtgtgatctcagctcactgcaaccactgcctcctggcttaagtgatcctcctaccttagcctcctgagtagctggaactataggtgtgagccaccatgctcagcttttttttttttttttgtagaaatggggttttgccatgttacctaggctggtctcgaactcctgagcttgagtaatccgcccatcttggtctcccaaagtgctgggattacaggcatgagtgactgcgcctggcctagtttttcatttttaattgrtaggtacagtgatatgacactgtaattccttgtcactcctttgctaggtgtctctcaacccatttgtgtgccctttgaaacttcagttttttgttttttttttttttttgagacggagtcttactctgttgcccaggctggagtgcagtggtgcgatctctgctccctgcaacctctgcccccggggttcaagtgattctcctgcctcagcctcccgagtagctgggtttacaggcgcccgcaactgcacccggctaattttcttttgtacttttagtagagatgaggtttcaccatcttggccaggctggtcttaaactcctgaccttgtgatccacccaccttggcctcccagtgttgggattacaggcgtgagccaccgtgtccagccacttgtctttcagtctgtgtactctatgtatagcattatgaatgaaaagggtcaggttattcttggaatccacaattaaataattgtttagccatttcatgtgtggtattagaaaatatacaatgatctgcccaagggttccaagatggctgaataggaacaactccagtctacaggtcccagcrtgagtgacrcagaagacgggtgatttctgcatttccagctgaggtaccgggttcatctcactgggatttgtcgtacagtgggcgcagcccacagagcatgagccgaagcagggcaggtcatcacctcacccaggaagcgcaaggggtcggggaattccctttcctagctaagggaaactgtgacagatggtacctggaaaactaggacactcccaccctaatactgcgcttttccaacagtcttagcaaacaacacaccaggagattatatcctgcgcctggcttggagggtcccacacccatggaacctcacccactgctagcacagcagtctgagatgaaactacaaggcggcagcaaggctsagggaggggcatccgccattgctgaggcttgagtaggtaaacaaagtggccgggaagctcgaactgggtggagcccactgcagctcaaggaggcctgcttgttgctgtagactcccctctgggggcagggcatagctgaacaaaaggcagcagaaacttctgcagacttaaacctccctgtctgaaagctttgaagagagtagtggtcctcccagaatggagtttgagatctgagaacagacagactgcctcctcaagtgggtccctgacccctgagtagcctaactgggagagacctcccagtaggggccgattgacacctcatacgtccgggtgcccctctgagacgaagcttccagaggaacaatcaggcagcaatgtttgycattctgcaatatttgcagttctgcagcctctgctggtgatacccaggcaaagagggtctggagtggacctccagcaaactccaacagacctgcagctgagggtcctgactgatagaaggaaaactaacaaacagaaaggacattcacaccaaaaccgcatctgtacgtcaccatcaccaaagaccaaaggtagataaacccacaaagatggggagaaaccagagcagaaaagctgaaaattctacaaatcaagagtgcctcttctcctccaaaggaatgcagctcctcgccagcaacggaagaaagctggatggagaatgacgagttgagagaagaaggcttcagatgattggtaataacaaacttctccgagctaaaggaggatactggcaaactgaatccagcagcacatcaaaaagcttatccaccacgatcaagtcagctttctccctgggatgcaaggctgattcaacataccttgaatcaataaatgtaatccatcacatacagaaccaacgacaaaaacttatgattatctcaatagatgcagaaaaggccttcagcaaaattcaacagtkcttcatgctaaaaactcaataaactaggtattgatggaatgtatctcaaaataatagctatttatgacaaacccacagccaatatcatactgaatgggcaaaatctggaagaattccctttgaaaactggcacaagacagggataccttctctcaccactcctcttcaacatagtgttggaagctctggccagggcagtcaggcaagagaaggaaataaagggtattcagttaggaaaagaggaagtcaaattgtccctgtttgcacatgtcatgattgtttatttagaaaaccccatcatatcatcccaaaatctccttaagcagataagcaacttcagcaaagtctctggatacaaaatcaatgtgcaaaaatcacaagcattcctatacaccaacaacacacatacagagagccaaatcatgagtgaactcccattcacaattgcttcaaagagaataaaatacctaggaatacaacttacaagggatgtgaaggacctcttcaaggagaaccacaaaccaccactcaatgaaataaaagaggacacaaacaagtggaagaacattccatgctcatgggtaggaagaatcaatatcgtgaaaatggccatattgcccaaggtaatttatagattcartgccatccccttcaagctaccaatgactttcttcacagaattggaaaaaactactttaaagttcatatggaaccaaaaaagcccacattgcccagacaatcctaagccaaaacaacaaagatggatgcatcatgctacctgacttcaaactatactacaaggctacagtaaccaaaacagcatggtactggtaccaaaacagatatatagacaaatggaacagaatagagcccttggaaataataccacatgtctacaaccatctgatctttgacaaacctgacaaacacaagaaatggggaaaggattccctatttaataaatggtgctgggaaaactggctagccatatgtagaaagctgaaactggatcccttccttaccttatataaaaattaattcaagatggattaaagacttaaatgttagacctaaaaccataagaaccctagaagaaaacctaggcagtaccattcaggacatagacatgggcaaggacttcatgtctaaaacaccagaagcaatggaaacaaaagccaaaattgacaattgggatctaattaaactcaagagtttctgcacagcaaaagaaactaccatcagagtgaacaggcaacctacagaatgggagaaaatttttataatctacccatctgacaaagggctaatatccagaatctacaatgaactcaaacaaatttacaagaaaaaaatcaaccctatcaaaaagtgggtgaaggatatgaacagacacttctcaaaagaagacatttatgcatccaacagacacatgaaaaaatgctcatcatcactggccatcagagaaatgcaaatcaaaaccacaatgagataccatctcatatcatttagaatggcaatcattaaaaagtcaggaaacaacaggtgctggagaggatgtggagaaataggaatacttttacactgttggtgggactgtaaactagttcaaccattgtggaagacagtgtggcaatttctcaaggatctasaactagaaatgccatttgacccagcaatcycattrctgggtatatacccaaaggattataaatcatgctgctataaagacttctatgaccaaagatrtaggaggatttcccacccacaccaagcaacagacactagctgggtatcctccaacttagttctgacactacctacccagagatagcatcagatcccacaggcttagtctcacaagactgccccttcttttcccctagttgcaagtcctggactccagaacttctggctgactggcttcaagttggggttcccatgacctcatctgtgaattccagtaatttgctaaagcagctcacagaactcagggaaacacatttaccagtttattaggaaggatatctaatttttttactttttttttaattrttatttttttcatacagagtctccctcttgttgcccaggctggagtgtaatggcgtaatctyggctcactgcaacctctgcctcctgggttcaattgattctcctccctcagcctcccacatagctgggattacaggcacctgccaccatgcctggcctttttttgtttgtttgttttttaagtagagacagggtttcatcatgttggccaggctggtctcaaactcctgacctcaggtgatccacccaccttggygtcccaaagtgctgggattacaggtgtgagccaccacgcccagccaggaaggatattttaaaggatacagatgaagagatgtgcagggtaaggtatgagggaagatgcatatggcttccatgctctccctgggaatctcaccctgtaggaacctctggaagctctccaaaccctgtcctcttgagaggtgaagccagctggacttcctgggtcgagtggggacttggaggacttgtctgtctagctagatgattgtaaacacaccaatcagcactctgtaaaaatgcactaatcagcactctctgtctagctaaaggattgtaaacacaccaatcagtgctctgtaaaaatgcaccaatcagtgctgtgtctagctaaaggattgtaaactcaccaatcagcactgtgtaaaaatgcacgaatcagcgctctgtgtctagctaaaggattgtaaatgcaccagtcagcactctgtaaaatggaccaaccagcactctgtaaaatggaccaatcagcaggatatgggtggggacaaataagggaataaaaactggccaccccagcctgcagcggcaacctgctttggtccctttccacgctgtggaagctttgttcttttgctcttcacaataaatcttgctgctgcttactctttgggtccacaccacctttaagagctgtaacacttgccacggaggtccgcggcttcattcctgaagtcagcaagaccacgaacccactggaaggaagaaactctggacacatctgaaggaacaaactccagacacaccatctttaagagctgtaacaccgcgaaggtctgtggcttcattcttgaagtcagcaagaccaagaacccactggaaggaaccaactctggacacactcttgggtgttcatggaggcttcattacataggcatgattaattaaaccattggtcattgatgatttaacttgacttgtagcccctctcccctccctggaggttgtagggttggggctgaaactcccaaccctctaatcctgccatcgtctttccagtgaccagcaccacgctgaacctagcagacaaaagacagcacgttggagatcccaaggaatttaggagttgtatgccagggaacaggaacatatttccatcctataacatatcttggccatataactaactcatagagcacttactatcccttattgaaagtatttgttttatgtcttctatttaattctgagcctctagagtctaagaagcatcttttagttgtcctttcctctgtcttggtatctgatacagtgccacattatttttctctatctgtagcaactttctttttttttttttttttttttttgagacagagttttgcttttgttgcccaggctggagtgcaatggtgtgatcttggctcaccacaacctccacctcccaggtttaagcgattcttctgcctcagcctcctgagtagctggtattacaagcatgtgccaccatgcctggctaattttgtatttttagtagagacggggtttatccatgttggtcaggctcgtctcaaactcccaacctcaggtgatctgcccgcctcggcctctcaaagtgctgggattacaggtgtaagcccctgtgcccagccagcaatttcttctagaaagtcccagcagaggctgggtatggtgaatcacacctgtaatcctagcattttgggaggccgaggtgggtggatcccttgagcccaggagtttgagaacagcctggaacagcctgggcaacatagggagggacctcatctctatttaaaaagaaaaaaaagaggccgagtgcggtggctcacacctgtaatcctagcactttgggaggctgaggcgggtggatcacctgcgatcaggagtttgagcagcctggccaacatggtgaaaccctgtctctactaaaaatacaaaaaaaaaaaaaaaaaaagcctggtgtggtggcacacgcccagctactcgggaggctgaggcaggaaaatcgcttgaacctggggggcagaggttgcagtgagccgataacgcaccacttcaccccagcctgggcaaaagagtgaaactttgtctcagaaaaaaaaaaagaaaagtcccagctactttgggggctgaggcgggagggtcgttgaggctgcagtgatctgagatcatgccattgcattccagcctggaaaacaaagtgagaccctgtctcaaaaaaaaaaaaaaaaaaaaaaaaaaaaaaaaaaaaaaatcaggcaaactgaaattgaaggacattttacataaaataaccaatcaacattcttcagaagtgcaaagacgtaaaagataaggaaggattgaggaattataatagcctgggaaagaataagaagaaataactaaattcaacgtataatggtggaaaaagaacattagtagaaaacttgaccagrtttgagtaaggcttatagtttagttgttaatactrtaccagtgttaatgtcctgttctcgatcatggcactatggtttggtaatatgttaacattagaggaagctgggtgtaacttctataaacctaaaattcgttaatgaaaagtttaaaaaataaaaaggtcaggcacagtggctcacgcctgtaatctcagcactttgagaggcctaagtaggaggattgcttgaggccaggagttgcagaccagcctgggcaacatagcaagaccccgtcactataaaaatgaaaaagccccaggaaaaaacttttaagttttctcaataaatatcctttaatttttttctttttaattctagcaccaagcaatatcatttatgctggctgaaatggcaatgraagttgaactagctagaatgagwtaccagagagcagcttgggaggttgattctggtcgtygaaatacctrttatgcttctattgcaaaggcatttgctggagatattgcaaatcagttagctactgatgctgtgcagayacttggaggcaatggatttaatacakaatatcctgtrgaaaaactaatgagggatgccaaaatctatcaggtaaggttaaagatgatttttttggtttgcaaggagagagaatattcataaatgacaacgtggatttctgattatttagaaattttatgtccctagtagcaataaatgactgtcatatatggctgtgagccagtttttggaattaattaatagaaagaagaatgttatttgtgattaagtataagtctgaagagagaataggctaaaaaaaatggtacagacatgtgtattacgtttggattagatttctttgagttttaacagattggctaattgtaacccaaacttttctctccaaaaagtatgcatgtcatttaaaattaattattttgatttgaatcttgcctgacaactatttaatttattgtaactatacttggagtcaaaaaccaacatcaggagacagtgatgtagattaattccaaattaaattggtagtcaaaaaaacttaggaggaattcagtaaaaggaaatataaatgtgcatgttctctacatgtggcttaagtaattacttaataattaccacattcttgctcctcagtatctcttcccttgttccccctacacctagcaaattatttgactcatccagtcattggaaatactgagttcgaatcaaaatgctggagtgagaaggaatgttacacgtagtgcagcctctccatgtagacatgaaaaaactgaggtccagaatttgtgccttatccaaagtcacaggtttatgtggtgatactcttcctctcctagagcctttaattataattattactattattatcatcaacagtttrgcttttctctgccatctgagaagatgaactaacgaatggctaaagttagaagtttagaatggaaataaggtctgactcttgaaatccttccagcatctttttctttagcaactctgttccacaggyagtgggagaaaaaaaaaaaaattaagggtaagaataaaagactgaaggagacagctagctaagaacagttcagaaaattagacaaatattttggccacattaaactttagttttcccaaactttctgaaatgtaaatatcttttctttttttakattttgaagactcttctccaaaattttgataaatggctttttataataacttaaccaatctttagagaattccatattttcagactttcacaaaatcaggttttggaatctgtagaggctacagaccctatatatggtttgattcggttttatattacaacacagcttatgctactgtctaaaatgttgaataaatcaaagtatttatgtactaaagatatttaacctacacttatatttttcttgcagatttatgaaggtacttcacaaattcaaagacttattgtagcccgtgaacacattgacaagtacaaaaattaaaaaaattactgtagaaatattgaataactagaacacaarccactgtttcagctccagaaaaaagaaagggctttaacgttttttccagtgaaaacaaatcctcttatattaaatctaagcaactgcttattatagtagtttatacttttgcttaactctgttatgtctcttaagcaggtttggtttttattaaaatgatgtgttttctttagtaccactttacttgaattacattaacctagaaaactacataggttattttgatctcttaagattaatgtagcagaaatttcttggaattttatttttgtaatgacagaaaagtgggcttagaaagtattcaagatgttacaaaatttacatttagaaaatattgtagtatttgaatactgtcaacttgacagtaactttgtagacttaatggtattattaaagttctttttattgcagtttggaaagcatttgtgaaactttctgtttggcacagaaacagtcaaaattttgacattcatattctcctattttacagctacaagaactttcttgaaaatcttatttwattctgagcccatatttcacttaccttatttaaaataaatcaataaagcttgccttaaattatttttatatgactgttggtctctaggtagcctttggtctattgtacacaayctcatttcatatgtttgcattttggcaaagaacttaataaaattgttcagtgcttattatcatatctttctgtattttttccaggaaatttcattacttcgtgtaatagtgtatatttcttgtatttactatgatgaaaaaaggtcgttttaattttgaattgaataaagttacctgttcattttttattagatattttaaagacytcagaaaatataaatatgaaataatttaagaacccaaatctctgaatttaatatttctttgtaattctaaatatcgaatactgctaaactgtgttatactaaatggagtgctttctgacatcacatctcattctctagttctttgacatcaactgtgtcctacattttaattctgttctgacactatgcagcagagttagggtcaaccccataaggctgccctcacttcagaggccagtcacaagtcctgactccccaagctacccatactctgtccaacatggctacaaattcaggtattcccatgaccctgccctcagggtcgataatttgccagaatagctcacagaactcaggaaaacacttaacttacatttacctgtttatatcagaaagggtacaactaggaacaattaatgaagaggtgcatagggaaaggtatggagggagaagggaggtgcagagcttccatgccttcttccagcatattaccttccctgcatgtctctgtattcctcaacgtggaagctccccagctcaaattcaatagtttccatggagctcaatctccagtcctccactcctccccagaggaccaaggtgaaagctggaagctcccaactgtattagtctcctagggctgtcataaaaaatacactggagacttggtagcttaaataaatttattttctcacagttctggaagctagaatttcaagatcaaggtgccatttgggttgtttctagtgaggcctctcttcctgccttatagactgccaccttctgtgtccttacatgtcctcttctctgtgcatcatgaagggttgggttagggggagctcttgtgtctttttctcctcttctaaggacactagccctgtgagattagagtcctatcctcatgaccttaattaactccctaaaagatcctatcttcaagtacagtcacattgggagttaaggcttcaacataggaattttggagggacacaactcagtccataacatcaccctctaattacttagtccttctggtgaccagattcctcctgagattatctaggggccccaccctaagtcatctcatgccaaattcaggtatgattgaaaaggtttataaggaataacagaagataactccaagaactcaagaaattccaagggttttaggagctctgtgccaggaacaaagacctrgggacctgggaacaaagaccaaataaatttcttataccacattaaattaccaaaataatcgaatttcttacaaatataaaatatttaaatgacatttccttcatgctcaatgatgaaattttatttaaatgatacaacttgagattggtaaggagatttagagaattcttaattgggtattatgtagaaatgagaagttaaatagaatgtatatatttcaaatgcaaatttgaatttgcagtacagaggcccaaccatttctaaacataaagcttctagacatgggctgggcatggtggctcgtgcctataatcccaacactttgggaggttctgaggtgggaggatcactgagggcaggaatttgaggcttcagtgaactgtgatggcaccatttatactccatcctgggtgacagagtgagaccctaaaaagaaaaaaaaggtccaggcaaggtggctcatgcctgtaatcccagcactttgggatgccgaggcgggcagatcacaaggtcaggagtttgagaccagcctggccaacataatgaaacccggtctctactaaaaatacaaaaaattagccgggcgtggtggtgagcacctgtaattcgagctacttaggaggtgaggcaggagaaacgcttgaacccgggaggccgaggttgcagtgagctgagattatgccattgcactccagcctgggcaacaggagcgaaactccatcaaaaaaaaggaaagagagaagggaggaaggaagggagggaggaaggaaggaagggagggaggaaggaagggaggaaaagaaaaggtttctataccagatataaatgtactccaaaagaagggagggagggagggaggaaggaaggaaggaaagagaaaagaaaaggtttctatacaagatataaatgtactccaaagccttatgatgagaatattatagaatccttgctaataaatattaagcacttatgtaattttgcatcagttaagcctttttagtcacaagtaaatgaatttaagcttctttaagcaaatatgtattttaagtatgtggaaatgactcataggtctgaaagggaggaatgaagtcagtctcaggaagggactaaaactagaatagtcagtcctcaggaatccatgaaatatatatagtcttttgctaactctctacttctgtcattttattcattgttgctctatagtctaactttctctgcttctttgatcccacaatagaatcagacttcacggtagcatatttatattttggattgaccaccacatttataagcttgctgactagggccattacaagaaggagggtaggtacagtcatggactacaaacatgactattagttgcccccatcagtgaattgatggttcctagagaaagcacagttttacatgtgatctagtaggtttaccagaattttaatgaatgtttaaggaatctaccagagtcatcaatttgcatagagggagaagaattattcagtgactcctctggattaaaaaaaaaatggttgttgatatggcttctagaattacagccattaatttgaatatattatcaaatagtacaaagggtctttggagattaaagattaaattccacaggcaacagtgttttttcttttcttaatatgtgaaagactgtatttaactcattggatgagggaactagtacaaagttaaaactggtataagggagaatttaaagagcagatagaggcagtaataaatgcttaaaagaatttgctaggctgggcgtggtggctcacgcctgtaattccagcactttgggaggccaaggcgggcagatcacctgagatggggagttcgaaaccagcctgaccaacatggagaaaccctgtctctactaaaaatacaaaattagctaggcatggtggcacatgcctgcaatcccagctactcgggaggctgaggcaggagaatcacttgaacctgggaggcagaggttgcagtgagctgagatcgtgccattgcactccagcctgggcaacaagagtgaaactctgtctaaaaaaaaaaaaaaaaaaaagaatttgctagtagattgaccatatcctatagggcaggggtccccaacccccaggccacaaaccagtagcagtctctgggccattaggaactgtgctgcacagcaggaggtgtgtgttgggcgagcaagcattactgcctgagctccacctcctgtcaaatcagtggcaacattagattctcataggagcacgaaccctattgtgaactgcacacatgagggatctaggtttcgtgctcctatgagaatctaatgcctaatgatctgagaacatttttatccccaaaccatctccccttgcaccccccactgtgtctgtggaaaaattatcttccacaaaaccggtccctggtgccaaaaaggttggggatcactggtatagggcaataaacctaatgggaccatcttttctacagagcagaaattagttgtagttaaggttcagttgcattactttcctttttttttttttttttttttacaatttaacatctacatttacaattgtataacagtctgtccaataaaaagacaatggtacatatcccatcagataatatgcagaggatccattagatagtacctagcacaccactaaagggatgcccaataatttattgtatcctttttcaaggctttgacagtgtttcttaacagtctcttacttttcatcaaaaggaatctgccacaagtattcctgatcagtaaaaagcaaatttcattaggtttatgtggattatttgcctaggtacagcaagagtgttcgttagtcatgtagatctcctcaaatttactttgcaaatccagaaccatacagtactgaacaaattactaaggccacaggattaacttctgtctgaaatttttcatcagagacctcaaatcggacttttaaaagcttctatagcttgacatcccaaggctggggaatcaaatccaagaaactctccactagatttctcctgtagtacctaagagcttgggtgaatctctctccttaacatcttcagaatttgctagggttcctggcctgccgagcattgctcttccttaccacttacaaacatttaagccaggcacttttccagtgttattgagacagctttgtaggtattgactctacatataaagtcaacttgtttttaataacgggcttctcataactgattaaattagaattattttcaaaaaggacactctaggtatggccctcatgacctaatcagttatcctggtaaaaaggaggtcagattccttttgaatactgctgtgaaataaaaggaaattcagcacattcctgaattctgagggcttaggatcacatgccatttaaaaatgtcagagctgggccctgtggtttatacctgtaaccccagcactttgggagactgaggtgggaggattgcttaagcccaggagttcaagactagcctgggcaagatggtgagacctcatctctacaaaaaattagaaaattagctaggtgtggagatgcacayctgtggtcccagctacacagggggctgagtcaggaagatcccttgcgcctaggaggctgaggctgcaatgatccatgttcaaaccactacactccagcctgggtgacagagcaagaccttgttgcaaaaaaaaaaaaagaaaatttcagtttacaaaagcggagtacactaaattggagtcaatagcttatgaagaattttaaagggcttcctcatataccataaaaatagaacactacatcaacaatattccaataaataaataaccatgattaaacttctctcatcagttcattcagtcctgtgtaattatgctgctggaaattgggttggtggactgctttcatgaatcagtctgtttccagaagagagtcctagaaatgcagactcagttcactgctatggcttgaaagttgtctaagctatgtctgctcagaagcctgtacccatgactctattttttgaagaatttatcagtagtccaaagcacctggttctttccatgaggctctaagactgccctttcttgaaaacacaaatttggcttctagtttatagcagagcccttgagcaagcatcagagtagcacagaaactctgtgtacatggccaaagctaaatggtgtttgataaggtttggctctgtgtccccgcccaaatctcatcttgaattgtaatcctgggggtgatttcccccatgatagtctcatgatagtgagttcccacaagatctgacagttttataaggggctcttcccccttcgctttcttctctttcctgccaccatgtgaagaaggtcttgtttccccttcaccttccagcatcattgaaagtctcctgaggcctccccagccgtggaactgtgagtcaattaagcctctttcctttataaattacccagtctcaggtatttctttatagctgtgtgaaaatggactaatacagtgttaatttattcaatatcagaaagaaagaatacaattctttgttatagcatagctgctacatttctttgaagggggatcatttttatttgaataaatgtaatagaatattcagtgaaaagtaatcctttcttaaaggattgggtggtagacagaatttaagaaaggattacttttcactgaatacttttctgttaggcagctgctttttgaaattctgtgcattcacagatatatattttttcctttgtttcccacataaatagcatactatatggtttgttgctttctttttatgtctgttttcacttggtatattt

SEQ ID NO: 95103 - DNA, 45687 bp, Homo sapiens
  misc_feature (1)...(45687): n = A,T,C or G
ggggtggcggaacctgccagatggacgctttcatgcggcgcaagtgccagcagtgccggctgcgcaagtgcaaggaggcagggatgagggagcagtgtgagtgcagcgggagggggcggtgccggcctggccccccgcctagccctggggttctgctgaggcctgcatccccctacaggcgtcctttctgaagaacagatccggaagaagaagattcggaaacaacagcagcaggagtcacagtcacagtcgcagtcacctgtggggccgcagggcagcagcagctcagcctctgggcctggggcttcccctggtggatctgaggcaggcagccagggctccggggaaggcgagggtgtccagctaacagcggctcaagaactaatgatccagcagttggtggcggcccarctgcagtgcaacaaacgctccttctccgaccagcccaaagtcacggtactgccccctccacaaccttgagtgtgacggtcccaatggggtagagccagctgggccatcacccagggtgtgggagaatgaggctccagagggcaggggctttgggaagagggtcccccagggtgcaggcttggcctcaaggtggccacccagacttaggctcacaaagacctgggagtgaccctggtctcctgtgtcccagccctggcccctgggcgcagacccccagtcccgagatgcccgccagcaacgctttgcccacttcacggagctggccatcatctcagtccaggagatcgtggacttcgctaagcaagtgcctggtttcctgcagctgggccgggaggaccagatcgccctcctgaaggcatccactatcgaggtaatggtccatctgcccacaaggaaccccagagatagctccaggacagatgctgggagcagagttaaggaagaccagtgcttgccgttgtaggatgacattccacggcgaatagagtcttctatgagccaaggagagaaaggaaaaagggtctgaggctgagaaaattgaggatcaggctagaggcgctattgcagagaaaagttgccaaaaaggcttttcagaggagttagcatttgaatcaaagtagggataacatataagtattgagcacgtgctgtatgccaggctctattccaagtgttggcatatggggcaaagaacaaagcagatcaaaccccgtgccccaaaccttgtgctcacctggggaaagagtatcctaaggagatggggatgcagcatgtgcggaagcctgaagtggagaaagagctcgggctgtctcacgtgatggctgcacgctggtgtggctgagagaacagsggggaaggggacaagggataatcctggtgagattagacccccatttgggccaggaggggagggactagcagctgaagggtcacagggctcaagctccccctcccgctgccgcccttagatcatgctgctagagacagccaggcgctacaaccacgagacagagtgtatcaccttcttgaaggacttcacctacagcaaggacgacttccaccgtgcaggtagggcccaggggaggcttcggggaggcttggcgcccctgctggctggaagacctggggccaactcatccctgttggagtctctgtttctttatctccaaagttggggtgagggttgagccaaggtgagagtgaggtaagagtgcatgtgccacgtgtggtggtgcacgccaatagtcccagccactcgaggctgaggagggcagattgcttgaggctatagtgagccgtgattgtgcgacggcattccagcctggtgacagagaagaccgtgtctctattttttaaaaaaagcatgtattgagtgccgactctgtacattgggttgcagtggaagttgagatgggaggagccctgttaccacatcaggcatcttggtgggcattaggaaaagcattccccgcccccgccaaaacgtggtctcacccaagggaggcgggctggagctcggtccattgtgaagcgggcagccttctttactgtctaggggagcactgcttcctgccctctgagagcgctaacctgcgtgggtgggcttctggaagaaggcctgggcagtgagaggcactgcctaggaaaagggtgggaggagcattgctagtgctgcagagcatgcaccagggcctcgctccctcattgtcccacaatctctgggggacctctctgtatttcccgacatctgtccaraccccaccctctccccttcctcttactccggccctttcaccacccgagacggtcccagtaacccttttagtatgagcttagcagggcagggctgcagggaagcgtttctggcagaggagattggcgattgcagaggccctgaggttggggagagctggtggtttggaggaactacagggaggcccaggcagctggagcacaaggagatggggtggagaggaggtcgggaatcccaccctaccccttcccagccgctcctctgccaccaccctggaacactgccagggtccccttgaggggccgcctgcctccacccctgcctgatggggctgctcacagcacaggcagaagggtcctgtcagcacttaaggctgcccacttccctcctccgctcagaaccctccgcggctcccgtctcactgggagaagagctagagtcctctctgtggcccacaaagccctttaggacctggcctcgctcactctctgccctcagctctcaccctctccccctgttccagccactctggcctcttactggcacccatccagcatgctgcagccaagggcctgtgtacttggagtttcctctgcccagaactagggggaccaactggtcctagtttgcccaggaccttcccagttttaacactgaaagtctcatggcctgggtagcccccgtcccaagtcatgggaacagcagacgttggtcaccctcacaatccctcatctccttcggattggtcactgctccagcgtcacccagagcgcagccttccctgcccgccttgtgtaaaatagaaccatggctcagcagggcccttcacacttctctgcactgcctggttccattgaactcacagccctctgacaggctgggcctcttcctaatgtgtttgtctatgaccggtcccctaggctctcaaatgtaagtgctggagcctggcacgtggcaggtactcagtgacatttgatgactgaatgaacaagtcagttttgggaatgagtttgggctttaccttgagcagtggaagccagcgctgggaccagcacgatgtgacctaggttttaaaagcttccctttgcctttgtgaaggggacaagaatagggactcgggaagctgcagccaccgcccaggtgggaagggagggtggtgataggatagtagaaaatactgaagaaacatgcaccctcattcattccttcactgggcagcatgtgtggcacacctactacatgccagcactcatgggcacggggcacaggtggacagaaatgacaagaacgctgtaattactgctgtgttcccagccccagagactgtgggcagcgccagggtccaggatgtggggcacggtttcgggctgagggagtcacgggctgcctcccgccccgcaggcctgcaggtggagttcatcaaccccatcttcgagttctcgcgggccatgcggcggctgggcctggacgacgctgagtacgccctgctcatcgccatcaacatcttctcggccgaccggcccaacgtgcaggagccgggccgcgtggaggcgttgcagcagccctacgtggaggcgctgctgtcctacacgcgcatcaagaggccgcaggtagggccccgcagagcctctgcgcagagccaactacgtcccgcggcccacgtggtccgttcaggctgggttctgccagccacactgccctcccctccgcagagtctttcctcaggccccaccctgctcgactgggagccaggtctagtccaagcacagaggcgggccccacgctggctcccacgcctggtcggggaggggccctcctttctgttggggtgggcctcccaaagcctggcagggcaggggctcagccagcgcccacctgcctcctccctcaggaccagctgcgcttcccgcgcatgctcatgaagctggtgagcctgcgcacgctgagctctgtgcactcggagcaggtcttcgccttgcggctccaggacaagaagctgccrcctctgctgtcggagatctgggacgtccacgagtgaggggctggccacccagccccacagccttgcctgaccaccctccagcagatagacgccggcaccccttcctcttcctagggtggaaggggccctgggccgagcctgtagacctatcggctctcatcccttgggataagccccagtccaggtccaggagsctccctccctgcccagcgagtcttccagaaggggtgaaagggttgcaggtcccgaccactgacccttcccrgctgccctccctccccagcttacacctcaagcccascacgcagtgcaccttgaacagagggaggggaggacccatggctctcccccctagcccgggagaccaggggccttcctcttcctctgcttttatttaataaaaactaaaaacagaaacaggaaaataaaatatgaatacaatccagcccggagctggagtgcaagatggagagggcgcgggcttctagggacctcagtgacactgggtgcccgaacctgattgagcaggtgggactgggtgtccccaggctgttgggaaaagggtggcacatagggtcccagtgttgggtggtgtgtcgcctgctgtgaaagttcaggacagaggcctcagcctcagggtcacctccctggacaaggtgaatcagaactcacccttgaaggataaacaggatttaagtgaatgaggggacctggacttctgtccgaacaacaagtgtttgctgaggcctcctgtgggccaggcactgggttggccattctagagatggagacattcacccaataaatgtttccagagcattaactacagttaggcacaattctaggcactggaaacatctgtgaacaagataaccatcctcctaccaagactcgggggatagggactttaatgagcgtggcactgtggtggggctagaggaaatcagggaaggtatcacaacagaggcaatcgctgggacctaaaacaagagcctgggggctgggcctccaagttgagggaacagcacgtgcaaagtttgaaaggagagacgccaggagttcggagcgaagcgacgaagttcctccaatccttcctgcccctgtgccagccctgaaggagctgaatgagcaattccaatcgagggcgaaaggggggttggatggagggatgcaacttaaaggtgtatttatttggggcggggaacagcggaagtgagagtagttaccaatgatcaccttatcctaagagtagtgtaccgggcgcyccacaagtgtccctatcatgcgttgttgagtctaatttacgtatagggaaactgaagctaggatgaaggagaacagatcaagccaggactctaccgcttatcggccagcctctgcggggatcttgggcgtcaggtcaccagctggctgctgggcagcgacggggcagcgctccctacacggccccgggsgagaggcgggcggggggacgcggaggatgcgcgcgcaacacccgagggtgggaggagagagaacagaaccgcggcgcgcccagaccgcacgaggtcgtgaaggtagccgcgcggaggggcgtggcttcgggcagacaggtcatggggaggcggagttaagggaatttttcagcaagggggcgaggccacttcggaagctgagagagggggcggggcctgccctgcagtcgaacaagcggggcgtggccttgcccgcacttgggcaggcgggggcgtggcccgtctctgagcgccgcggctctgggcttgcgcgcgcgggagtcaggggtcacggcggcgtaggctgtggcgggaaacgctgtttgaagcgggtgagtagaggggaaaaagggagttcggggcagtgggcctggtagggaacggggcttgagcagccaggcacatagatctgagagacggttgcgagggcaccctttggcccgggggcgcgcaggagagggcaggggccaggggtttcctgggcgagggcgcggggacgagcaggaaaaggccggggtgggggtggaattcctcggcgggcagggggcgcatgcgccgggcaccgtggggcgggacgtggcccgggaggagctggggggactgggtggtgcacgtgcgggcttggtgtcatcctggattcgctgggtgtttgagtactctgtgccaggcacttttctggaagcaggaacaagtcagagaagtccctgtctcgggaagacagacggtagacaagtgatgagttttaatagatcagtaaagcagtgctctggggctgtgagatgctctcagaaggaaactaacgcagggtaacgtgataatgagcgaagagcctgttgctttagctggagtggtccagaatcgaccgctctgggaccctcaagtgcaaagccctgaggtggaaggagcttggcgtatttgtagcaggagccgaggggacgagagaaacacagatgaggtcggagtcatgatggggaactagatcctatagggccttgtaaaacttggtatggaatttctcctttattctaggttcagcggggagccgtgggagggtttgagcgtggaaacaacacgattcgccccatgttttgaaaaactcaccactgagtggaaattggattgtagcaggaataagaatggaaggagggagatctgttaggagggagagcgtcctgcaggcagagaatcaggctccggttacctttgcgggcggagacagggggactggctgatggactgggcgtaggagcaaggggaagagtccaggatgactcctgggtttgtggtttgagcagcaggctggatggggaaggctaagggagaagcaggttggggttgccgctctgaaggcaaagattagtgggggagtgagtgggcagggtttagagcggagccaggagtgggcagggcgatgtcagtgcctcgcctcagcccttccactgaaggaacttgttgccactgtcttctcttttttttttttttttttttgagacagagtcttgctctgtcacccaggctggaatgcagtggtgcaaactcagctcattgcaacctccgcctcccgagttcaggcgagtctcgtgcctcagcctcctgagtagctgggattacggcacccactgccatgcccagctcattttttgtatttttagtagagatggggtttcgccgtgttggccaggctggtctcgaactcctgacctcaggtgatccacttgcctcggcctcccaaagtgctgggattacaggcgtgagccaccacgcacggccgcttctcctccttcctgcacttcccccccacaggtctctcttccccctagagaggttccttccctccccctgaaatgctcttccctctcttatgtgtttctgacagctgctgtttggacaggccctctgctgagcactggggagccaatgatcattcagtttggttggggaaggacaggagatttcagtccagagtgcgctgagctatggcggagcagtgatagtctttgggagccaagagaagaacctgtgcgctcagggaagactcaccagagtggttgatattcacagggagtttcaactcacatgtctttttttttttggtttttgagacagggtcttgctctgtcgcccaggctggagtgcagtggcgcgatctcggctcactaacctccacctcccgggttcaagcgattctcatgcctcaggcttccgagtagctgggattacaggtgtgtgccaccacgcccagctaatttttgtatttttagtagagacagggttttgtcatgttgcccagactggtctcgaatccctgacctcaagtaatcctcccacctcggcctcccaaagtgctgggattacaggtgtgagccaccacacccggcctaaactcatgtcttgaagtaaccggacactgtgcagagtgatgctggagaccccaacttgggcaagatgctgactccttttctcaaggagctcacaggctgaaaggatcccagctctgcattgtgcaataacgaaagtggcacaaggcgttgtgggaaccctgaagggcagctggtcagcttggaggagctaagcctgagctgagtctctggatgcagtggagtttcatgcagcgaacactgcctaaggcctcctgggggcccaccctgtgctgggtgatgctaaggtcccagaggagagtcagtccttgctctgccatccagaggtccctggctggtaagggaggaagacacacacccaggcagtccagagacagcagtcacagaggcctaggggaaggacaaggccgaaagcatgcaggtgagcctgggcaacatagcaagaccctgtctctacaaaaaatacaaaagctaggccgggcgcggtggctaaggcctgtaatcccagcactttgggaggccgaggcgggcagatcatgaggtcaggagaccaagaccatcctggctaacacggtgaaaccccgtctctactaaaaatacaaaaaattagccgggcgtggtggtgggcgcctgcaatcccagcactttgggaggccgaggtggacggatcacttgaggtgaggagtttgagaccagtctggcagacatggtgaaactctactaaaaatacacaactagctggacatggtgggcgcctgtaatcccagctacctgcgaggctgaggcaggagaatcacttgagtccaggaggcggaggttgcagtgagcaagatcctttcccaaaaaaatatataaataaaaataaagctgtgagattgggcaagattggatgaggtcattgaggaaatgagtgtctcactcatcgagaaaactggtgtctggcctgcagcgagcacgtggtgtcattttgttgctgaatctctgttaagtgcttgctaccgaagggtcgtgagaggggcagaggacagtgtttgccaagctctcatcctgtgccagggccaatgagaggggacacacaggggcctttccttcctaatgctgctgtgcctccactaacaagagcccaggttttgcccctggtgacaccgtccctcccaccgcacccccgcagccacagccaactgaccaagggcagccagtcagctccttccttcctcctccagcttcagcactgactctgggctcccacaagcccctgcgcttcctctgtcccacccgggtctctcctcgcagatcatcactccctgtccctctctggctacttgcacaacccgaagccagagccgctaacgacgcttgcttcttcctgtaagtcacacatgtacgcggttgtcacccaaagagcacaaacgcagtcaaagtcttcctcacacaaaaccccctgcacacgctcacggctgcaccactcacaaaaggtggaagcaaccctaatgtccatccactgatgaagggatacgtcagacgtgttctagccatacagcggaaaagtactcagcaaaaaagggacacagcactgacgaaaggccgccacacacatgagcgatgaacacattcagagaaagcagccagacacaagaggctgcatattccaagatcccatttataggaaatgcccagaataggcagatccatggagacagaaagttagatgagtggctgccaggggtgggggcagatgggctgaatgcagggagagagctaaaggatttaggctttttggggtgatgagagagttctaaaattgactgtggtgatggttgcctaactctgaacatactaaataccattgaactatatatactttaaatgggtgaattgtatagtatgtgaattatagctcaataaagcagttagcaaatgaagtcttctaccctgtcccccaggaaaccagtttcttagctctccttrtagaatgatgcattaaaagcaaatagatttatacataygccctgcattacaataaaaaagacgtctacatactccctgcattacaataaaaaagacgtctacatactccctgcattaaaagcaaaaagatttctacatactcttctgcccaccttgtaaatttgttactattttcattttatatatttcccccttaatattttgaaaagtttcaaacctgcagagaaggtacaaattgagtacagtgaacagccayggccctttgcctagattcactggctgttggcatgacacctcatttgctttatgctttatccaagcacatgcatatacctgtaccttttgtcctttttttggctgaactatttgaaagttgtggtcatcatgatacttcacctctraaaactccagcagttaactcttttttttttttttttttttttttttgagacggagtcttgctctgtcacccaggctggagtacagtggtgcgaccttggctcactgcaacctctgcctcccaggttcaagcgattctcctattgcagcttcctgagtagctgggactayaggcgcgcaccaccacatctggctaatttttgtatttttagtaaagatggggtttcaccatctttgccaggctgctcttgaactcctgaccttatgatctacgtgcctctgcctcccagagtgctgggattacaggcatgagccaccgcacctggcctctttttttttttttggtacagtattttactctgtcatgcaggttgtagtgcagtggggtggtcacagctcactgcagcctcgacctccccaggctcagctgatcctcagcctctcgagtagctgggactaaaggtgtgtgccaccacaccctgctaatttttatattgtttatagagacagggtgtcaccatgttgcctaggctgatctcaaactcctgggttcaagcaatccccctgcctcggcctccaaatgtcctgggattacagccgtgagccaccgtacctggcctccagcagtcagctcttaagaacagggatgtccgcctgcagaactacagtgtcattgtcatcatcatgcagtttaacatgagacagtgacgttattgaatagacgattcttatttagatctgccaygtgtccctgtaatattcttcaaggctataaataatttcttattttttttttttttccaagactgagtcttgctctatcgcccaggctggagtgcagtggcactatctcggctcactgcaacctctgcctcctgggttcaagccattctcttgcctcagcctcccgaatagctggaattacaggcatgcaccaccacgcccggctaatttttttgtattttttgtagagacggggtttcattttggccaggctggtctcgaacccctgacctcaggtgatccgcccgccttgggctcccaaagtgctaggattacaggcgtgagccaccatgtccagcctgtttttttttttgttttttgttttgttttttttttcttttttgaaacagagcctcrttgtcacccaggctggagtgcagtggtgcgatcttggctcactgcaacctccrcctcccaggttcaatcaattctcctgcctcagcctcccgagtagctaggattacaggcgcctggcaccacgcccagctaatttttatatttttagtagagacagggtttcaccatgttggccaggctggtctcaaactcttgacctcaggtaatccacccacctcagcctctcatagtgttgggattacaggtgtgagccactgcgcctggccaataatttctttttttcttttcttttcttttttttttttcaagttacatgaagtaaatttattatttacagctaggcaacaagggaaaaccgaagcataggattcattgtgagccaatctcccgagactcaggaaggttgccccgggaggatggagtctcatttgtgtgtaccccatttgtacctggaaagcagaccatcttgggttttatattctggaggcaacatgacatgttgggctaaaatgatgaaggacatcctgtttctaggagggactggaacagagcctgggctgtttcagccagtccctccttatctcaggatattgcattcctagcacattctacagttattcttgagaactattttttttttttttttagtatttattgatcattcttgggtgtttcttggagagggggatttggcagggtcataggacaatagtggagggaaggtcagcagataaacaagtgaacaaaagtctctggttttcctaggcagagggccctgcggccttccgcagtgtttgtgtccctgggtacttgagattagggagtggtgatgactcttaaggagcatgctgccttcaagcatctgttyaacaaagcacatcttgcaccgcccttaatccatttaaccctgagtggacacagcacatgtttcagagagcacggggttgggggtaaggccrtagattaacagcatcccaaggcagaatttttcttagtacagaacaaaatggagtctcctatgtctacttctttctacacagacacagcaacaatctgatctctctttcctttcccatttcccccttttctattcgacaaaaccgccatcgtcatcatggcccgttctcaatgagctgctgggtacacctcccagacggggtggcggccaggcagaggcgctcctcacatcccagacggggcgtcggggcagaggcgctccccacatctcagacgatgagcagccgggcagagacgctcctcacttcctagacgggatggcggctgggaagaggcgctcctcacttcccagactgggcggccaggcagagatgctcctcacttcccagacggggtggcggccgggcagaggctgcaatctcggcactttgggaggccaaggcaggcggctgggaggtggaggttgtagcgagccgagatcacgccactgcactccagcctgggcaccattgagcactgagtgagcgagactccgtctgcaatcccggcacctcgggaggcccaggcgggcagatcactcgcggtcaggagctggagaccagcccggccaacacggcgaaaccccgtctccaccaaaaaatacaaaaaccagtcaggcatggcggtgcgtgcctgcaatcccaggcactcagcaggctgaggcaggagaatcaggcagggaggttgccgtgagccgagatggcggcagcacagtccagcctcagctcggcatcagagggagactgagaggggggagggggagggggagggagagggagaggtctttttttttcccactcccccgctcttgttgcccgggctggagtgcaatggcgcaatcttggctcactgcaacctccgcctcccaggttcaagcgattctcctgcctcagcctcccaagtagctgggattataggcgcccgccaccatgacaagctaatttttgtattttttttagtatagayggggttttcaccacgttggccaggctggtcttaatctcctgacctcaggtgatcggcctgcctcagcctcccaaagtgctaggattacaggcgtgagccactgcacctggcccatcattttacttttttaatccaagttctaacctaggataacacacattgtcatggcaactttttcattttttaagacatgtcttgctctcttgcccagactgtattgcagtggtgcagtcatggctcactgcagccttcacctcccaggttcaagtgatcctcccacctcagtctcccaagtagctgggactgtaggtatgcaccaccatgcttaagtaatttttaattttttgtagagattgactaatttttaattttttgtagaaatggagtctcaccatgttgcctaggctagtttctaactcctggcctcaagtgatcatcccacctcagcctcccaaagtgttgggattacagacgtgagcctcctagcccaggcaacttactttttcatgacatcgacagttttaaagattacagaccagtgttgtcacccytcacyttggattcgtttgtttctttttcttgttttgttttgagacagagtcttgctctgtcacccaggctggagtgcagtggcgtgatcgcagctcactgcaacctctgcctcccaggttcaagtgattctcctgcctcagcctcccaagtagctggtattacaggcacccaccaccacgcctggctaatttttgtattttagtagagatggggtttcaccatgttggtcaggctggtctggaactcttgacctcaagtgatccaccctccttggcctcccaaaatgctgggattacaggcgtgagccactgcacccaggctgtttgtttcttaatgactagaatcagggtaaacgttttcttagacattktttttcaacacaaaagataaaattgtgagtgcaccactgtgcatcttgctttatctactgaacaatgcctctttgagaaccttccctatcagtacrcaaagagcttcctcattcctttacacagttgcatagtattccattgaacggacttaacatatttaaatagccccctgggggaggacagttaggtggtttccagtccttggggatttcaaacgatgcttccggaaataaccttataaatgcagtttttcttatgtgataatatatctacagygtacgtccctagatgtggaattgagcctccaaacttttatgtttataattgaggtgkcatttacatggcrtgccatgcccaggtctccagtgtacagtcagctgtatagtgtgttttatcaccccagaaaccccctcatacccttcccagtctctcctaccctaggagcagccactagtctgatttctagcrctgtagatcactttagtgtattctacaactttgtctaaatggtattgtacaatttttatggaggtaaaattagccattttaaagcaaacaatggctgggcgtggtggttcatrcctgtaatcccagcactttggggaggccaaggcaggcagatcacttgagcccaggggtttcagaccagcctcagcaacatggcaaaacccgtctttaccaaaaaacaattggctaggcatggtggcacgcatctgtcttcataactactcaggaggccaaggtgggaggatcacctgagcccgggaggtcaaggctgcagtgagctgagatcatgccactgcactctagcctgggcaacagagtgagatcctgtctcaataaagagagaaagtaataataaagcaaagaattcagttggtacgttcacagtgttgtacaaccattacctctgtctagtttcaaaacatttcatcacccctacagaaaaccccatactccgtaagcagtcactcctcattcccccagtgtgcactttgscttctgcacagcctgctttcaagattcatccgtgttgcatgtctgtcaggagctggcccctctctaatgctgagtgtctgttatgaacctccctgaacatttctaacatatactccatcagttcagaatttttccatgcttatttcaggtctaagctgttgtaccaaggagcccccaaaacacagtggcccaagaaagatacaaattgatttctccacataacgctttggaagataggcaagtgtgcagggttggcagacagctttgctctggaaggttgttggggagcccagtgttgtccctgtccttgtggttggctctcccactacatccatgttccagccactgtgacggggaagagggtgggaggatgtcccagtagctgcacacctcatgatcactctcattcctggagggagaacttagtcacgtggccctcctggcrgcgcacactgggaaatgtagcctttggctgggcagcctgtggccactccggacacgcagggttggaggggtgtgttctattgcaaaaaagcaaagcaaagccgggcgcggtggctcacacccataatcccagcactttgggaggccgaggcgggcggatcatctgaggtcaggagttccacaccagcctggccaacatggtgaaaccccatctctactaaaaatacaaaaaaaaattagcgggtatgatggtggacgcctgtaatcccagctactcgggaggctgaggcaggagaatcgcttgaagccaggaggcgaaggttgcagtgagccgagatcagccactgcattccagcctgtgtgaccgagtgagactccgtctaaaaaaaaaataagtaaaataaaaaggcaaaatgaggactggatatggggcaaccgttatgagatccagggatagacagctgacctgctcccctgcctcttcccagccgcatctaggatctgccctaggttccagtaatcccctctgtctcagcctggaccctgggggacaagtactttgtttttgtttgtttgttttttgagacagaatttcacccttgttgcccaggctggagtgcaatggcgcagtcttggctcactgcaacctctacctcccaggttcaagggattctcctgcctcagcctcccaagtagctggggttccaggtgtgcgccaccatgcccagctaattttttttttttttttttttagtagagacagggtttcaccatgttgataaggctggtctcaaacaactgacctcaagtgatccacccgcctcggcctctcaaagtgctgggattataggtgcgagccacggtgcccagctgggtacaggtactttttaaaaacttctttctctgacaatttcaaattaacaggaaggttgaaagaataaatagtgtaggccgggcgcggtggctgggtacaggtactttttaaaaacttctttctctgacaatttcaaattaacaggaaggttgaaagaataaatagtgtaggccgggcgcggtggctcacacctataatcccagcacttcgggaggccgaggcgggcggatcacgaggtcaggagattgagaccacagtgaaaccccgtctctactaaaaatacaaaaaaattaggcgggcgcagtggcggacgcctgtagtcccagctactcaggaggctgaggcgggagaatggcgtgaacccgggaggcggagcttgcagtgagccgagatcgcgccaccgcactccagcctgggagacagagcgagactccgtctccaaaaaaaaaaaaaaatagtgtaaagaacacctgcacgccctttgcccaratcacctgtttcaacattctgtcctatttatgatttgcatggatgtttcttatctcccttctctctgtatacgtacactcactttttacaaagaattcccaataccttgcagacattatggcygtttactcctaaatacttgagtgtgtatctccttagaatattcttattgaaccacaataaagtcacccacttaagtttaacctgcatataaccttgtctaatcaaccagaggatatatacttttttttttttttttttttttttttgagacagggtattgccatcttgtccagtccagtcttaaactcctgggctcaagcgatcctcccaccttggcctcccaaagtgctgagattacaggcataagccactatgcccagtgaacttttttgttgtggttgtttttttgtttgtttgtttgggttttaattgttgttgttggtggtggtttttttttgtttttttttttgagacagaatattgctgtgttgcccaggctaaagtgcagtggcgcgatctcggctcactgcaacctccacctctcgggttcaagtgattctcctgcctcggcctcccgagtagccataattacaggtgtgtaccgccacacccagctaatttttttgtatttttattaaagatagggtttcaccatgttgaccaggctggtctcgaactcctgacctcaagtgatccacccgcctcagcttcccaaagtgctgggattacagcgtgggccaccgtgcctaactctagtcaacttttatattgtatatcttgtacattgtatatcttgtcaaggatattgtatatcttgtcaaaatacacccccaaaataataatatatatatatattttttgagatggagtctcgctctgttgcccaggctggagtgcagtggtgcaatctcagctcactgcatgctctgcctcctgggttcacaccattctcctgcctcagcctcatgagtagctgggactacaggcgcccaccaccatgcccggctaatttttttgtatttttttagtagagacggggtttcaccatgttagccaggatggtctcgatctcctgacctcatgattcacctgcctcctaaagtgctgggattacaggtgtgagccactgctcccagcctccaaaataatcttttataggttgtaattaagaaaacacaggccaggcttggtggcttacgcctgtaatcccagcactttgggaggccgaggcaggtggatcacctgaggtcaggagttcaagaccaggatggccaacatggcgaaaccctgtctctactaaaatacaaaaattagccaggcatggtggtgggcacctgtgatcccagctactcaggaggctgaggcaggagaatctcttgaacctgggaggcggaggttgcagccaagatcgcaccactgcactccagcctgggtgacagagcgagactccatctcaaaaaaaaaaaaaaaaagaaaacacaggccaggcttggtggctcacgcctgaaatctcagcactttgggaggccaaggcaggtggatcacttgaggtcaggagttcaagaccagcctggccaacatggtgaaaccccgtctctactaaaaatacaaaaattagctgggcatggtggcgcgtgcttgtaatcccagctacttgggaggctgaggcagaagaattgcttgaactgggtcccgggaagcggaagttgcagtgaatcgagattgtgccactgtactccagcctgggcaacaagagtgagattctgtctttttttttttttttttctgagacggagtcttgctctgtggcccaggatggagtacaatggcacgatctcggctcactgcaacctccgcctcccaggttcaagcaattctcctgtctcagcctcctgagtagctgggattacaggcgcctgctacctcacctggctaatttttgtatttttagtggagatggggtttcrccatgttggtcaggctggtctcgaactcctgacctcgtgatccgcccaccttggcctcccaaagtgctgggattacaggcgtgagccatcrcacccggccctgattatgtctttaaaagaaagaaaaagaaaacacaaatatatataagtagcagtctgtatgtgttttgtgttgtgttttgtttgctactgtgggtcctggactcggggagaaagcaggttactataaacggcattttggagacagttggagaaattgggaaaggtgccctttattttatatcaaccttgagtcagtgttaaatgtcctagattgtatcgtactgtgctcggtgaaaggaattccttrttsttaggcactacgtgctaacatgtggaggggtatgggatctgcaaggaactctcaaattactcaggaaaagaagtaacaatatgrtgtgcataccgcacatgtgggagggcagagagaggcggtgagagagcacacacacgacacgctgaccaccggggagcctggggaagggcatacaggagttctaggcatttgagattatttcaaagtatttaggttggtgcaaaagtaattgcagtttttgtcatttcaatggcagatggcctgggcagatgggtggttggtaggcgaggtatcggagacagaggtttatggaaaataaagagatgtgccaaggccgggcgcggagactcagkcctgtaatctcagcactttgggaggctgaggcgagtggatcacctgaggtcaggagttcgagaccagcctggccaacatggcaaaacccygtctctactcaaaacacaaaaattagctgggtgtggtggtgggcgcctgtaatcccagctactcgggaggctgaggggagaatcgcttgaacctgggaggtagagcttgcagtgagccgagatcatgccattgcactccagcctgggtgacaagagcacaattccatctcaaaaaaaaaaaaaaaaaaaaaaagcragagatgtgctaaggacctagtgtgatgggagagagggtcrgggagtcgacggggctgctgctgcagtagctaacaattgagcgtctggaatgtgctcccaccccactgcctgcagggtgcagagagctatgttagtacagccagtccagagtaggaaaaggctcgtggtcatggtgggtgcatgggatgccatgsagacaggstaagaggygtctccggtcagaacctccaccaagctccaacttgcccagcaggatggatggcaagcggcggccaggcccagggccyggggtgcccccaaagcgggcccrtgggggcctctgggatgatgatgatgcacctyggccatcccaattcgaggaggacctggcactgatggaggagatggaggcagaacacaggctgcaggagcaggaggaggaggagctgcagtcagtcctggagggggttgcagacggtaaggcttggagttggaggntcctgctgcccaacccattrcccctggtcttgcctttggtccaagagtcanctgcaaagctgacctgtgaccccactctggccarttttgaatcctacaaaggactgcccttccaccccgtgcagcctgtgtggcctacagtgattctggccctgacccttgaccctcattctcttccaagtttcctgcctgacccagaccaccacctctgcstggctcctttcagaaccacatgccatcctggccrgggaagaccatgactccatgtactccacttccttcccttcccccaccagggcaggtcccaccatcagccatagatcctcgstggcttcggcccacaccaccagcgctggacccccagacagagcccctcatcttccaacagttggagattgaccattatgtgggtgagtttaggggttatgggtgagtgctggggccctgcgctcctggggcagaggccgggccaggtcagcccctctggccctgtgctcctggggcagaggccgggccaggtcagcccctctggctctgcccctctggttgccatagagctgtagtgacagaacagaccagtgggtgccaggggttgtggagtgcsaagcgaaggtgacacagggtcagcttgagggaggtgcttggagcgttgatctgttttgcatacgtagtagctgcagcctgtgcaaggacctctgtgccttaaaattcataacaccagacacataaaccaaaagtcaatttgacttcttttttttgagatggagtcttgccctgttgcccaggctggagtgcagtggtgtgatctcggctcactgcaacctctgcctcccgggttcaagtgattctcctgcctcagcctcccaagtagctgggattacaggtgcacaccaccatgcctggctaatttttgtatttttagtagagatgggcttttgccaagttggctaggctggtcttgaactcctgacctcaagtgatccacccgccttggcctcccaaagtgcttagattacaggtgtgagccattgtgccagcccaatttgactttttaaaagattttttttttttttttttttttttttttgagacaagattttcctctgttgcccaggctggagtgcacctggccaataattttttttttttttttttttttttttaagatggagtcttgctcctgtcgcccaggctggagtgcagtggcacactcttggctcactataacctccgcctcctgggttcaagtgatccttcttcctcagcctcccaagtagctgggattacaggcgcccgccatcacgcccggstaatttttatatttttagtagagacagggtttcgccatgttggccaggctggtttcaaactcctaacctcaggtgatctgccgaccttggcctcccaaagtgctgggattacaggagtgagtaactgtgccccrcctattttttttttttttttttttttttttttgagacagagtctccctctgtcacccaggctggagagcagtggcacaatcatggttcactgtaacctcaacctccagggctcaagtgatcctcccacctcagcctcggagtagctaggactacaggtgtgcaccacaatgtctggctaactttttttttttttttgagacggagtcttgctctgtcacctaggctggagtgcagtggcgcgatctcggctcactgcaagctctgcctcccaggttcacgccattctcctgcctcagcctcccgagttgctgggactacaggcacccgccccaactcctggctaattttttgtatttttagtagagatggggtttcaccgttttagccaggatggtcttgatctcctgacctcgtgatccgcccgcctcagcctcccaaagtgctgagattacaggcttgagccaccgcgcccggcctggctaacttttaaaaatatacttttgggcccggcatggtggctcacttttggaggctgaggcaggctgatcacttgaggacaggagttcaagaccagcctggccaacatggtgaaaccccgtctctactaaaaattcaaaaaattagccaggtgtggtggcatgggcctgtaatctcagctgttcaggtggctgaggcacaagaatcctttcaacctgggaggtggttgaaatataaatataagatatatatatatgatatattctttatrtattaatttatgtrtaacatatattatatattaatatattttgtagagacaaatatatttatttgtacatrtaatatgtgtgtgtatktgtgtatatrtrtatatatatatatatatatatatatatattttttttttttttttttttcttttttttgagactgggtctcgctcttttgcccaggctggtctcaaagtcctgggctctagcgatcctcccgccttggcctcacaaagcactggaatcacaggtgtgagtcactgtgcacggccagttgtttttatcttgtaataaaaaagaagggcctccctgtagttgtgctgtggagaatggatcctgggggatgaggctggagatgggaaccaggggggaggctgaaatggacacagggaacggtacaggggcaggagtgccccaggctgcaggccccaaggtatttcgaggctgtggagacacaccttggaggaycctgagaggcatggccgctgtcttaccctgtgaccccacaggcccagcrcagcctgtgcctggggggcccccaccatcccrcggctccgtgcctgtgctccgcgccttcggggtcaccgatgaggggttctctgtctgctgccacatccacggcttcgctccctacttctacaccccagcgccccctggtgagtgkyccctacccagcccctccctgagccactggagccccctgcacctctgatcatccctcccacaccaggtttcgggcccgagcacatgggtgacctgcaacgggagctgaacttggccatcarccgggacagtcrcggggggagggagctgactgggccggccgtgctggctgtggaactgtgctcccgagagagtgagtgctcccccaggatcagcgggttggngggtcccctcgggaggccattggctggtcccagcttcttccatccacaggcatgtttgggtaccacgggcacggcccctccccgttcctgcgcatcaccgtggcgctgccgcgcctcgtggccccggcccgccgtctcctggaacagggcatccgtgtggcaggcctgggcacgcccagcttcgcgccctacgaggccaacgtcgactttgagatccggtacggcctctgcctcacttctcyrgcctctatccccaccctygggcagcccctgtccactgacccccagccccctccaggttcatggtggacacggacatcgtyggctgcaactggctggagctcccagcygggaaatacgccctgaggctgaaggagaaggtgcagggcttcccagggcagggctgggtggggagctggtaccctgctgccaccgctgacccacccatgcccacaggctacgcagtgccagctggaggcggacgtgctgtggtctgacgtggtcagtcacccaccggaagggccatggcagcgcattgcgcccttgcgcgtgctcagcttcgatatcgagtgcgccggccgcaaaggtctgtccccgggcccgggctcctgccygcctcattgatgtgccaagtygggggtcggaaaggcaggtccggtggaggraatggcaagcatgaaggtgcyggggcaggagcaccccagcccatgtggccagatggagtgagcacagagggtgtggagatggcctgkaggtgagagcagagcaggagccagggtgagccacgtagggccggcaggcagcrgggacagccccggggagatggcagstgcagcctccctgctgtgttgggagtgaggggcaggagtcaggcccytgcatcctnctgcctcgcaggcatcttccctgagcctgagcgggaccctgtcatccagatctgctcgctgggcctgcgctggggggagccggagcccttcctacgcctggcgctcaccctgcggccctgtgcccccatcctgggtgccaaggtgcagagctacgagaaggaggaggacctgctgcaggtagctctcgctccacgccccacaccatttcccggggtccccgccagcctccrcgtcctgagccatcagctcctgggtgctgcgacgcccatgtctgtkggtctgggtgggtgtctgtgggtctgggtgggcccctgtgcaattaggcttgagsacttcccctctgggttctgcaggattttcaggggtggctggggttctagaacattctggaagtaggggaatccgaggcagggcaaccaccagggtgacccaatgtgctcccacccccaggcctggtccaccttcatccgtatcatggaccccgaygtgatcaccggttacaacatccagaacttcgaccttccgtacctcatctctcgggcccagaccctcaaggtgagggctgggcaggtgggaggcttctctcagatgccccaggtgtggcctccgggccctgggcctccttcccactccctctccacatggcttggtgcatcttgctctgtgtgcctcagccgattgcctgcaggggcagcctaggcctggycctgccctgctccaagtcgaaaaagttactgtggcttttatcagaggcaaggagggcgttacggtggagtaagagaaggctgtgcattcaaggtcggcctgaagcttgcaggggttcaacaagccatgaagcagccactgaatcccagtcttcctttaggttmtatcagcataaggaaaagaatcataatggaggaggaggggggagtgtgttgactgatggggcaaattccggatgcttcttgagtctgcatgtgtgtaagggtggattcctctgcccgagttgctgtaacaaagagccacagaccaggtggctgaaaacagcaaaaagtcattgtctcaccgtcctgaaggctggaaagtccatgaccaaagtgtcagcgggcctgcttccttcgggggctgcaagggaggactggttcacggcctctctccttggcttgcagacggccatcatccccctgtgcctcttcacaccgtcttctctctgtgcgtgtctgtttccacatgtcctcccttttttttttttttccaagacaaagtctcgctctgtcgcccaggctggagtgcagtggcgcaatcttggctcactgcaaactccgcctcccaggttcatgccattctcctgcctcagcctcccaagtagctgggactacaggcgcccgccaccacgcctggctaattttttgtgtttttagtagagacggggtttcactgtgttagcgaggatggtcttgatctcctgaccttgtgatccgtctgcctcggcctcccaaagtgttgggattataggcgtgagctactgcacccaaccccttttctctttcttttttttttttttttttttttgagacagagtctcgctgtgtcgcccaggctggagtgcgatggcacgatcgaggctcactgcaacctccacctcccaggttcaagcgattctcctgcctcagcctcccaagtagctgggattacaggcgtgagccaccacgccccgcaaatttttgcttttttgttattgtttcttgagatggaatttcgctcttgttgcccaggctggagtgcaatggcacgatcttggctcaccacaacctccgcctcccagggggcgctggggtgyagaagtgattctcctgcctcagcctcccaagtagctgggattataggcacccgcttccatgcccgactaattttgtatttttagtagacagggtttctccatgttggccaggctggtctcgaactcccaatctcaggtgatctgcccacttcggcctcccaaagtgctgggattacaggcgtgagccaccgcgcctggcctatttttgtttttgtttttgttttttttagcagagactaggtttcatcatgttggccaggctggtctccatcctcacctcaggtgatctgcccacctcagcctctcaaagtgctgggattacaggtgtgagccagtgcacctagcccacatgtcctctttgtgtagtgacaccgtcgtgaggtgagggcccaccccagtgacctcatcttcacttgaccccctgcgaagacatatttccaaatgaggttacattctgaggtgccgggggttagggcttcaacatcttttgggagaacatggttcagcccttaatgagatatattgccttattttcctgcttttctctatgtctggccagcttggtaatggaaaaacaaaacaggctgggtgtggtggctcacgcctctaatcccagcactttgggaggatgaggcgagaggatcgatggagcccaggagttcaagaccagccagggcaacatagcaagaccctgcctctattaaagagaaaacaagaaaaaatccattctaaaatacagaacaaactcttaggacccccagtgtatattccacagcgtggcgctgatgcccgggccatggtactcctcctccccttccctgggtgtccctcaccctctgccctgkccccagctcaggcttcttctggcctcagtctcccccaggctgggccccagcaccctgcaaggcctcctgcagccaggcgccctccagcgccctcagcatccatctcagcccagctccacgccgcctcctgcctctgccccmacctggccgcctgctcacagtgtccccaaatctcttcctgtttcctgcctaggtacagcccgcagacactgggctccatccttggcccccagtccatcagggcccctgactctcgctatcccagccttggctgcagcttagtccttactccggactccctccccagtctccagccacccacacccagccccagaccgtctttctgccyccagggttgctctygaccccctagggttgttataaggatgttrtggttggyctcaatctccgttcttcaggctkatgtgacggggacccrcagcctgctgcacaccctksctctcctcctcaggtacaaacattccctttcctgggccgtgtggcyggcctttgctccaacatccgggactcttcattccagtccaagcagacgggccggcgggacaccaaggttgtcagcatggtgggccgcgtgcagatggacatgctgcaggtatgggcgggaggtggggtgtgtccctgtccttggaaggccactgcccaggcccgcagcccaccagcccacccacccacctaggtgctgctgcgggagtacaagctccgctcctacacgctcaatgccgtgagcttccacttcctgggcgagcagaaggaggacgtgcagcacagcatcatcacygacctgcaggtgcctgctgcctccctgacctctcaccccaacctctgacctccacctcacccttccccggcctctgacctcaacttcacgcccccacgtctgacctcactctttgacctgctgttatgacctgtgaccttacctgacrcccactttttcctgacctctgaccccagatttctctccactcctgtgacctctgtcactatgaccttgtctctgctttcctggcctgaccacaggtccacggtggccttcaggctgctccctcctcctccctctggccctgtggactccctggcccccaaccctacctccatccccacccagaccctgacgacttggagggccctcctgcccgcctcmcctcccaggccctccccaggctacctcaccctgacccccacttccttctcctgctccacctcccrcccccaacccctggtccctgaccccatccgtgcccatccccagaatgggaacgaccagacccgccgccgcctggctgtgtactgcctraaggatgcctacctgccactgcggctgctggagcggctcatggtgctggtgaacgccgtggagatggcgagggtcactggcgtgcccctcagctacctgctcagtcgtggccagcaggtcaaggtcgtatcccagctgttgcggcaggtcagtagccgagacttgtcctcgccaccccccaccaggcacgtctgtggccccctccaggcaatggcatcctggatgcactttttctccccactcccaatccgcacggccccacctatacccactccatttcccaccttctcccctcccaggccatgcacgaggggctgctgatgcccgtggtgaagtcagagggcggcgaggactacacgggagccactgtcatcgagcccctcaaagggtgaggccccaggctgggtgcagtttttacctgtaatctctgggaggctgaggtgggaggatcacttgagctcaggagtttgagaccagccagggcaacatagcgaggcccctgctccacaaaatttttttatttttatttatttttatttttatttttttgagacagagtctcgctctgtcacccaggctggagtgcagtggcgcaatctcagctcactgcaagctttgcctcccgggttcacgccattctcctacctcagtctccacagcagctgggactacaggcgcccaccaccacgcctggctaatttttttttttttttttttttttgcatttttagtagggacggggtttcaccgtgttagccaggatggtctcgatctgacctcgtgatccacctgcctcggcctcccagagtgctgggattataggcgtgagccaccgtgcccggccgaaaaaatttttaaaaattagccaggcgtggtggtgcatgcctgtaatcccagctacttgggaggctgagctgggaggatgatgagcccaggaggtggaggctgcagtgagcgatgattgcgccactgccctccagcctgggcgacagagcaacaccccggccctaaaataaattaataggccaggcacggtggctcacccctgtaatcaatcccagcactttgggaggtcaaggcaggcggatcacaagttcaggagattgggaccatcctggctaacacggtgaaacccccgtctctactaaaaatacagaaattagctgggcatggtggcgggcgcctgcagtgccagctactcgggaggctgaggcagaagaatcgcttgaacccgggaggtggaggttgcagtgagctgagattgcgccactgcactccagcctgggtgacaaagcgagactccgtctcaaaaaaaataaaataaaataaaatagtagattaattatatatattatttttctttttctttttctttttttgacacagggtctcactctgtcacccagggtggagtgcggtggcatgatcttggcttactccacctcctaggctcaagcaatcctcctgcctcaggcccctgagtagctgggaccacaggcgtgcaccaccacacctggctaatttttaaaatttttttgtagagatagggttttgccatgttgcccaggctgatctgaaactcctgagttcaagcgatcctcctgcctcagcctcccaatgtgctgggattgcaggagcgagcactgctcccagccaatgaatgattttttttttttaaagggtgaggccacaagacagggcgggggcggcatgggaactcctagccctgactcccggccgcggctgctcccctcccaggtactacgacgtccccatcgccaccctggacttctcctcgctgtacccgtccatcatgatggcccacaacctgtgttacaccacrctccttcggcccgggactgcacagaaactggggtatagtgcccaattcagcatgtgtcccccgaggcccatctgggccttccctyggggggctcagtctggtggggggcataggcacaggcccagagatagtagggagtggaggggtgcttgaggggcctgcgtgtgctcatggccaaggccaggaccgtagggcagaggtgggctggagcaggagggtggccggcagtcaccccaacatcttccaacccagcctgactgaggatcagttcatcaggacccccaccggggacgagtttgtgaagacctcagtgcggaaggggctgctgccccagatcctggagaacctgctcagtgcccggaagaggtgagccctggagatcgcctgcttggagctcagacctgttggggcctctgggcaatccctgtccctcactgggacaccccagggctgcccagccaccctgccctcagctgtgcgtgaattagcacaaggcatcccctcctggcagcttccttttgcccccttggccagaagcttctgtgcagtgcacagtacgcccaaccrtacatggcactcacttccagaaaggagccctgaccaatgcccaggtgccgcctgagtgtgctttccccgtgttccctcrcagggccaaggccgagctggccaaggagacagaccccctccggcgccaggtcctggatggacggcagctggcgctgaaggtgagcgccaactccgtatacggcttcactggcgcccaggtgggcaagttgccgtgcctggagatctcacaggtgggcactcgggcccctggaaggcaactgggggcaggtgggccccctgtgtaggagaccagggctccatgtgggggacctgtatccagaggactgggcaccccaactcactggccttctagagagaggatgccaatgtggcttgagcaattggtccattccttcactcagcaaatgcctactgagcacacactgtggtcagggctcactctgtgccctggggatacagaggggaacaaaatggatgagagctcctgtccctgtcatcttgcagcccagtggggacactgacaggtctgtgtaaacgtgtttaggacacaagtggcgctacgagctttgcagccggataaagcaggaggtgcggactgtcggggagtgatggggctgggcgggactcacccctctcaataggcgacgctcacacagaggccaagggacgtggggagggaagccattcaccgtccccacggcagcgtcccggtctgcctacccacggcagctctgctgcttgaacagaaaaacagattctttgaaaccacagagggcctgagtttccgagattgccaagctggggtcagtgccccagctcctggcatatgagggcctcggaagggtcttcctgtccagccttctcccctgggacttgagtcttggcccattccaggccagtagttgtgctgctctgcttggttacctctagccacggggagctccctctctggctgggcactgcgccacttttcacagggctctgggtggaaggcttggatgaattctcagtgggtggggcctttgcacacacccacccacccgcagttctgggggtcccaaagaccacttaggttcagtgattcactagaagtactcagagagcagaaaagctggttctcatggttatgatttaatacagcaaaaggacacagattaaactcagcaaaagaaagaggtgcacagggcagggtataggagggaccaggcgtgtcttccagttgtgctctcccagtagagttgccaggctggccctccttcctcccagtkttgatgcgtgcctgcacacatgcagcattgccaaccagaggctctcacccaagctttggggtccagggtttttcttgggtgtcagtcctataggcatggagcaccctgtgactggccttagtgactccatcatccccaggcccctcagcaacccccagaggtcaaactgatactgcatggcccagggccctaccataaaccatgttagtgtcaactacctggtgtggttcaaagtcccaggtacacaaacaccttttttttttttttttttgagacagagtctcactctctcacccaggctggagcgcagtggcacaatcgtggctcactgcagcctcaacctccgggactcaggtgagcctcccacgttagcctcccaagtggctgggactgcgggcacgtgccacctatttttgttattttttgtagagatagggtctcgccatgttgcccaggctggaacagagacactgttatcaggcgggatattctaggggcttagactaccaggagccaggcaagagccagacctttctttgcacaaagtgaatcgctcactgcatgctcccaactcccctctgcctttcacagtccccggctgcctccccagcctccttggtggaaaggggtggctgtgtggacatcaggctcyagccctgaagcagaggccaggccaagagagcacagcttggccctcccctggggctgcctcttaccaatcctgtgtctctgtcttttctctctcagcygcttccctctgtcactgttctgtttctgtctcttgacctctttccttatttctgtctctcaagcttatgggagcaagaggtggaataataaaaatgcaatgaattggctgggcgcggtggctcacgcctgtaaccccagcactttaggaggccgaggcgggcggatcacgaggtcaggagttcaagaccagcctggccaacatggtgaaaccctgtctctattaaaaatacaaaacattagccaggagtggtggcaggtgcctctaatcccagctactcgggaggctgaggcaggagaatcgcttgaacccaggaggcagaggttgcagtgagccgagattgcgccagtgcgctccagcctgggcaacagagcaaaactccgtctcaaaaaaaaaaaaaagtaatgaattacagtgttcacgcctgtaatcccaacactttgtgacactgaggagggaggatcacttgaggccaggggtttaagaccagcctgggcaacatagtgaaaccccatctctacaaaaaatacaaccaaacaaaactagccaggcattgtggtagctcatgcctgtagttgcagctactcaggaggctgagacgggaagatggcttgaacccagcagtttgagttacagtaagctgtgatggcatcactgcactccattctgggtgacagagttgagaccctgtctcttttagtttttgtttgtttgttttgagatggagtcttgctctgtcacccaggctggagtgcaatgccacaatcttggctcactgcgacctctccctcccgggttcaagtgattctcctgcctcagcctcctgagtagctgggattacaggcacccgccaccatgcctggctaatttttgcatttttagtagagacggggtttcaccatgttggccaggctggtcttgaactcctgacctcaggtgatccacctgcctcggcctcccaaagtgctgggattactggtgtgagtcaccacgcttggcctcctgtctcttaaaaaaaaaaaaaaattgaatcatttcaggaaaagattacaaaggaaagaaaaaggaacataggacaggtggaacaagtaaaagctagacagtaaagtggtagacgtaagcccagctatatcagtaattacactaaatgtaaatggacaaaatgctctagwyagacagatttcctgactggatccacacaaacaaaaacagaagaatcacacccatctctccttggtgtccccacccccagcctcaggtttggtggtggtggtggtggtggtggtgktgttgtttaagtattttttagttttgtgtgtgtgtgtgtgtgtatttttagtagagatggtgtttcaccatgttgtccaggctgatctcgaactcctgacctyaagtgatccagccacttcagcctcccaaagtgctgggtgtacaggcataagccaccacgccagctagttttcttaactctaaaataagacagtgggtttctcaatggtttcttagtcagggtggtgccaccccctgctctggggggcatttgtcaatgtgtaggtagggccagttctggtggtacagggatgggggtggcactgctggcttccagggatggggctggctatgtcggtggtcctgtaccatagagagctgcccagaatgtcagtgtgagggaaacactgggccagtggcctcttcaggccgcagtctttccagcatgcatttgatgtagtcacttccttgtgcatgtccagaactctgagccagggaacccacttctttccacctgaccattgaggagccgccttatagtcccattttgcagatttgggaactgaggcccaggaggggcagagtggcttgtrcataagcctatgccactgggaaatggcagaggcgggacccctcccccgccggcccacgttcactgcacatggcccccagggcttcactccgcatgattctctccccgacagagcgtcacggggttcggacgtcagatgatcgagaaaaccaagcagctggtggagtctaagtacacagtggagaatggctacagcaccagygccaaggtcgggggctgcccaccgctgccctgagatggrcccagggcaggtggggggatggaagccgggccggacccccatgtccccgtgcctcctggtcacaccctgcccactctcctgttgcatccttgggtcccgttggcattagccacctgccaccmcccgacaccagtagttgacagaagggaccctgcttctcacatrcacacatccccaccgcccgcaggtggtgtatggtgacactgactccgtcatgtgccgattcggcgtgtcctcggtggctgaggcgatggccctggggcgggaggccgcggactgggtgtcaggtcacttcccgtcgcccatccggctggagtttgagaaggtgcgtggctgggtcaggggctctgcatttaggtgccctcatcagggtactcagggtgtcccgttctttgggttcacaaaagccacagtgtgaagggatgttgctgcttagattctcctgaggctggggccttggtttgggaagcctccaaggccttgggctttgttaccctggatggcatctgttctttgaaaaccctgtcgctgtccctggttttgaggtgtcacagtgtccctggttttgaggtttcccagtacctgtcagatgtggagctgccctccacgcagggaccctgatgggggtgcaccttagatctgtgcaccattgcccctggccctctgagtgcggcacacttggtcccaggaaaccttgcaccatattttcttttgaagagtctgggtctcgctctgtcgcccaggctggagtgcagtggcgagttcacagctcactgcagcctccaactcctgggctccggcgatcctcccgccttggcctcctgagccgccacgcccagttctcacactgtactgtttccccgtggcttaacgctctctcgtgccaggccttggacttggagcctcgcagagtggggaggtctctgcctcagggctcacccagccgtagtttctcctctctttcatgggatgcttcatcgactcscctgtctggatctcatgttttagggactatctggatttatcccagtctctgtttcagattggggtctctggtgtgggggctctggcattgccgaggggcctcaggagccacttccagccatacagtgtctcggtccatcccaccaggctcagggcacggctcccatgtcctcaaactgcgtctgggaccctgtctaccttcagtttctggggggcgtctccagattggggcttggcctcctcaggctcagggtcttggccatggctccctcccaggtctacttcccatacctgcttatcagcaagaagcgctacgcgggcctgctcttctcctcccggcccgacgcccacgaccgcatggactgcaagggcctggaggccgtgcgcagggacaactgccccctcgtggccaacctggtcactgcctcactgcgccgcctgctcatcgaccggtgtgtggggcctcctccctcagactcagggggctgggccccaaacccctcctccctcagacccaggagtctaggccccagcccctcctccctcagrcccacgggtccaggcccccagccccctcctcctcagatcccggggtcagggcccccagccccttcctctcttagatacaagagtccagacccccagcccctcctcctctgggaacacaggtgtcaggcccagctcttcctcggtggtgaagcagtggaaagagtcggcttrggcagctgtgggttcaggccctgcctctgccactctgcagcctatggtaggaagggcccctctctgccctgagcctcagccctaagagctcatcctggtctccagccctgagacccgtggaggcaccagcctggccctcagtgccttttggtgacgctgtgcggcccgctctcctacagagaccctgagggcgcggtggctcacgcacaggacgtcatctcggacctgctgtgcaaccgcatcgatatctcccagctggtcatcaccaaggagctgacccgcgcggcctccgactatgccggcaagcaggcccacgtggagctggccgagaggtcctgcgcggggcgggtggcctggccagaaataaccccctccttcctgccagctgggcccacttcctacaccctcgcccccacccccgccacccacctgccctcacccacccgccaccccgtctccacgcaggatgaggaagcgggaccccgggagtgcgcccagcctgggcgaccgcgtcccctacgtgatcatcagtgccgccaagggtgtggccgcctacatgaagtcggaggtcaggcccacctggctgcctgctcccgcccagccccctcgctctcacttctgctttccgagatgggcgggcctgcgggaagggtggggcctccgcgtgcctgtgggccctgcagaaccgccccccatggcagcctgggtgtggcctcggcccctctggaggtcccccctctattctgacccctcccttgcttccctatggaaggatccgagtctctaccctgtgcatacaagcctcccagctcgggtgttcccttggattcataatcctgcagctctaccaccacccccagtacccacatcttagccccatgacctctgacctcctgaccccttcctcatccttgcttccccttgtgaactctgacccttccgtggtgacctgagagccctacagactctgtggcccagagactccgtgacctccgaccccatcccagacccaggccccccccatgtcacagcccgcaggcaggcctaggccctaagccccaggccccatgaccaccccgtgtccaccccggtgccctttccctggctgcccgggtgtgactgccatgtggccgcaggacccgctgttcgtgctggagcacagcctgcccattgacacgcagtactacctggagcagcagctggccaagcccctcctgcgcatcttcgagcccatcctgggcgagggccgtgccgaggctgtgctactgcgtacgggggcaycaggggactgggggcaccctgggggggcagrggagatcaccggcccaccacctgcctcctctcctgcagggggggaccacacgcgctgcaagacggtgctcacgggcaaggtgggcggcctcctggccttcgccaaacgccgcaactgctgcattggctgccgcacagtgctcagccaccagggtgagcggccctggccactgggcccccactggccctcaacctgctctgccgtcaccccagatcctagacacccaccccatcggctggcactgccacccagtgggcccagggcccctgggtgggtggcccctgtctccaccccccacagagggtcctcggcccccaccccgggagttccccaggggagttttcccagcacacttgctccgttgttctccagcctctggggactttcagaagctgggattggcagtgggcagggatggggtggcccagttcctggctgggccccagcacttgggctgacccgcctccccacaggagccgtgtgtgagttctgccagccccgggagtctgagctgtatcagaaggaggtgagagggccgggaggtgaggaggggccaggtggggaggcgggggcgccctgctyagcygctgccgtccccaggtatcccatctgaatgccctggaggagcgcttctcgcgcctctggacgcagtgccagcgctgccagggcagcctgcacgaggacgtcatctgcaccaggtgtgtgccrtgtcccgaccctgggctgcccygccccttcccagctcccaggcctgtgggttgtggacccaacctctgactccaaggcctctcctgagcatcctccccgcccatccccttccagctgtgagctgtcctgagcctcagtgtccttgtctgaaaaatgggcccatcccagccccccagagggggtgggtgcttagggaggcagcgcccggcacccagtgttgcccgggaaacggctgtcctcccgacacacccagccagcctggccccctccccagggcggggccgggctttccccagggaacgggtaggcggggtgggttcccacgccaggtgacaggtgatatacggccagccatggccctgcacctcgccaggcacccgctgttatcggctccscccccccaccccccccstgcctgctgagcaaacagcccgctgcgggagggggcgggtgggctgggcagcaggcggggaccaaagtcctgggaacagcccccacccctctcccaggctgggcactgggccttggctggtcctgaccctgcccctgcccccacccgcagccgggactgccccatcttctacatgcgcaagaaggtgcggaaggacctggaagaccaggagcagctcctgcggcgcttcggaccccctggacctgaggcctggtgaccttgcaagcatcccatggggcgggggcgggaccagggagaattaataaagttctggacttttgctayatggtgctttgtggtctctgggggacactgtctggtttcataagccctggccttggctgggaccctcctgaggcccgcaccgcccctcatcctcagcaaaagcccccggactcccacctgtgctgcctggttcatgtgggccaagcctgcctcagtttcctctctggccctgaaggaacccttataccagcgcttctctgccctgcttagggcccccaggtgtctggccccggcccagccctccctggtgatgaccctggggaccctggtggctgccccgccctccaggtgctgacctgtttcctccaggccctggggcagccccaggcgcaccggggcttccactcctcagcccggccaaggggacccccccatcccccgccggaccacacacccacgatgtttccacgtcggggtcctggcaatgggctttgggtctgggtttccccccagcgactcccatctctatccccgcagcctctaactgccgtcagatgccctcggccctcccgtcacctcacacatcccccggggagagtcttgtgcttgcccctcggcccccagcccgcccctgctggaattcggctcctgggtccagatcctccgtttcctgattctcctcttcagtgaaccccagcccttcctcgatgttttcagggttcccccaaatccagctcctgtcccatctccagccctcaaggtcagccccccaaacccagccccacggggatccccaaatccagacagcccctggcccgccatccctgccatgtgacaaaggggttgtgcaatccagccccctcccctgaccccctccctgaggggatttttgaggagggccgagcttgtggccagcgggcaccctcctccccccggcaggggctgggccaagatataaatagggttggcggctgcagcgggcggcaaacagcccgcccggcaccaccatgctcgccctggaggctgcacagtaagtgaggcccccaaacctgcacccggggtccccacctgcactgcccctctgtggggcctcacccatgggcagtggtttctctgctcctcacggccggtgggtgggagtggaggggaggggtcygccctgtctcttgccccttctggttctgttccctcttcacttcggactctccatccccccagttcctatctttcctggtccccaaagatctcatttccccagaacacttgctagcgtgccctcctgcgggcgtcctccgtggctctcactctgtccatcctcctgtctccccgagttcccgtatctgttcgctctgtatctggcatctcccagctctcaacattctgcctgttgctctctgtctctctgcctgtctctgtgtctctgtctccagttctcgctctccctgccttttggtctccttctgcctcaccctcactctcagtgcctccatctggggctccaggaatcctccccgcctctgtgcgtgaatgtccctttgcacacctttctctgtgtcccacctctccttgagcctcctcatctgagtcttctccgggcttccccctctctacccagacatctctccatccttctcctctggtccaagctggactcaactgactcgccaccaaggccgcacttgacccaggccccctctccatccccacacctcctttccgggactttctctccctcactttccctgcccctccccaccagggtgtctatgcaaattctggggaggagggggacatttgcctcccccccaccccccacttcctgtcccagcagggggtagtgggggagtccggtgaatgtggtggggctggtccctcacacagggctgcggtggtcacagctgctgccgcctccccatcagcccccaaccactttgagattcaggtggctggaggcagcctcagcatgcccctgtgtctctccccctccaggctcgacgggccacacttcagctgtctggtgagttggggcccctgggggccagggaggggtggcccacagtgacctccctcagagaagtcatttgcttcctgcctcagtttcccctcccacctcttcctgtcactttgtttctgagctcccccttggtatctcctgctaccccgcatccgtatttttgatgtctctctccccctctcaggcttgaatccacttccttgtggctttgtatctctctctgcccatcccatattcagacaatgtattttcatgttcctttccttctttttgttcgtatttttaaaaattgtgttctctaacagttcagatacggaatactatacccaacacccttgaacccacaacccagtctgagtaatcaaatcttactgatgtggttgaaagaaagcccctgtttatgcccctccacattcacaccccagccatgttttttttgtttgtttttgtttgtttgttttttaattgaagtgtaactaacaagtcagtaaagtgacaaatcttgtgtttttgcattatctatacaccgtgtagccacaagccagatcaagataccgaacatttcaatctctgaaatattccttcctgtcccttctcagtcaatacctttctctgatattttccgccaccaatttgtaatttgttttgcctgctcttttttttgttttgctttttgagaaggagtctcgctctgtcgcccaggctggagtgcagtggcagcgtcttggctcactgcaagctccacctcccgggttcaagcaattctcctgcctcagcctcccaagtagctgggattacaggcatgtgccaccatgcccagctaatttttgtatttttagtagaggcagggtttcaccatgttatccgggctggtttcaaactcctgagctcaagtgatcctcccacctcagcctcccaaattgctgggattacaggcgtgagccaccgcacccagctgcctgcttttgaactttatgtaaagtgagtcatacagcatgtcccttttggggtctggcttccctcactcaacatgaagtgtgtgtcagtgtttgtcctttttccttgctgtatagtactctatctatgatcagcccacaccacagtctgtttatcccttcttctgttgatgacacttgggctgtttccagttggagactcataataaagctgctgggatgattctggaacaaggctattttgtgcacatccattttcagttctcttgattaaatgccaaggagtgagactgccaggtcctaggcatggtgtggatctagctttagtttttcctagactcgagttcttgaagcaacaacacatgattcatggggcgaatcaacatatggagatttatttatttatttatttattgagacagagttttgctctgtcgccgggctggagtacagtggtgcgatctcggctcactgcaacctcagcctcctgggttcaagcgattctcctgcctcagcctcccaagtagctgggactacaggtgcgcaccaccatgcctggctaatttttgtatttttagtagagacggggtttcaccatgttggccaggctggtatcgatctcctgacctcatgatctgcctgccttggccttccaaagtgctgggattacaggcatgagccaccatgcccggcctatttatttttcgagacagagtctcactctgtcacccaggctggagtgcagtggcgcgatctcagctcactgcaacctccacctcccaggttcaagcgattctcctgcctcggcctccagagtagctgggattacagacatctgccaccaggcccagctaatttttgtattttcagtagagatggggtttccccatgttgtgcaggctggtctcgaactcctgacctcaggtgattcactggcctcagcctcccaaagtgctaggattacaggcgtgcgccaccacgcctagctaatttttgtatttttagtagagacgggatttcaccatgttggctagactggtcttgaactcctgacctcaggtgatctgcccgcctcggccccccaaagtgttgggatgacaggcgtgagccaccacgcctggcctggaggtgtatttaaaaagcattgacccctgcctctgttaagtgaaacacttccatttccccttgcccttcacctccggagcccccaggcaggcaaggctgggggagttcttccaccccttctccaggcgccctgattcgctgactgtgtgccagtgaggggccagggttcttgggagcccaccgtcttagcaggagctggctgctgtgtgcccctattgggttgtgtctctactctctgtatctctgtctctttgtccctgtctctgatgcctagtctctgtgtttctttgttgctctaatctctccagcatcccctcttctctcccatgtctgtgttggagtctccccaagggtccagggtgggggttgggagtccccaaggcctgggatgacccctcttccctcctgcaccccgtatcagtacccagatggcgtcttctatgacctggacagctgcaagcattccagctaccctgattcagagggggctcctggtgagtgaccccagccctgtgcccttcctgccttggggcccatttcacagataggggagctgaggcccaggggaggtcatttcctagcacaacaggataaaggtggcccgggcctatagccctcctcccctttcctctcctacccatccgctcctccatgcaaatcctggggtcagagatttgcacagcctacaatggcctctctgtgctgggggcttcgactgcgaggaggcctccgtgagacatcccagcttctgactcagtgcccttcccccagactccctgtgggactggactgtggccccacctgtcccagccaccccytatgaagccttcgacccggcagcagccgcttttagccacccccaggctgcccagctctgctacgaaccccccacctacagccctgcagggaacctcgaactggcccccagcctggaggccccggggcctggcctcccyscataccccacggagaacttcgctagccaggtgagtggtaaggggacagttaaaatcaagcccaaaccaggtgtggtggtgcacgcctgtaatcccagctgcttgagaggctgaggtgggaggaggattgcttgagcccagaaggtcgaggcaatccactgcactccagtctgggcaacagagcaagaccctgtctcaaaaaaaaaaaaaaaaaagaaaaagaaaagaaaactcaagctcagtcatttggttgaggtttgctgggtgccgggcactgcattgagactgcacatagtaagccctgcagcggcctcccaggttacgttccgttgttgcccctctgaacaagtgagtcaagagaggtagtgacaggaagccagggacagggcagactcgcattacctgtgttgggccggctttgaggaggtacctcaggtgtcccctggccacagcgtggtgatctgaacaaaggccaaaatctaggctgtcaacaaagagggagaccagagccaggagggccaccgccttggcctgagaggaggaagtggagggagacaaggggtccctggacatgcaggtgaccctgaccttccgcagaccctggttcccccggcatatgccccgtaccccagccctgtgctatcagaggaggaagacttaccgttggacagccctgccctggaggtctcggacagcgagtcggatgaggccctcgtggctggccccgaggggaagggatccgaggcaggtatgcgggagtggctggggtgggggagatgccagctggagatggtgggggggctgagagcaccatggcttcctgggcctctacatatactccagcactctgggcagctcccagatccgcaccacctgctggctgtgtgaccttgggtaagtgcctctacctctctgtgcccaggtttcctgtctgtgcgatggggatggaggtgatagtgtctaccctcctgaggtcgttggggggactaaatgggatagtaagtgtaaatgggacag

SEQ ID NO: 95104 - DNA, 20834 bp, Homo sapiens
ctatggggaggagctgtccatacgccaccgtgagacctgggcctggctctcaaggacagacaccgcctggcctggtgctccaggggtgaagcaggccagaatcctgggggagctgctcctggtttgagctgcattcaggaagtgcgggacatggtaggggaggcaaaaagccttgggcactaccctccctgtggagctgttcggtgtccgtcgagctagccacaccctgacaccatgttcaagggtaccggaagagaagggtgtctgcccccaacctcccctgtgggtgtcactggccagatgtcatgagggaagcaggccttgtgagtggacactgaccatgagtccctggggggagtgatcccccaggcatcgtgtgccatgttgcacttctgcccaggcagcagggtgggtgggtaccatgggtgcccacccctccaccacatggggccccaaagcactgcaggccaagcagggcaaccccacacccttgacataaaagcatcttgaagcttttactccgtttttataaggattggtttgttttgtgtttttgagactgttttgctcttgatgcccaggctggagtgcaatggcgcaatctcagctcactgtaaccgccacctcctgggtccaggtgattctcctgcctcagcctccggagtagctgggattacaggcacctgccaccacgcctggctagttttgtattttcagtagagatgaggtttcaccattgttggccatggtggtctcaaacttatgacctcaggtgatccgcccacctcggcctcccaaagtgctgggattacaggtgtgagccaccatgcctggcctgtcacgggttttctcttaaggtctctgttgctatgccttctctgaaagcgtgcattggctgtgtgctgtgggcagccagtcccttctgatgggtctgcttttgctgtgtgtggcttctgtgttggtctgggtttagggtgtgctggggccggaatctcaggtgacagctctgtgaggactcactgagccctagcagttctgacctcacagctgaggccttgggcacaggggcccctgttaaacagcggacagaacactccaaactctggtgcttcatcctctgtgggttcagctgctgagctgcgtccagggggagccacccaggcctctgcccactagcaggcccccagctctgaacaggtccttccagcaggctgctgggaaagggtgggctcttgccaccaggtgggagttggtcacagccacaggtaaccccacctggcacttggggtctccatgaacctgcaaggaagccaggctccctcccagggccagaaagtgtgaggggtgttcattcctcagccttcccagggtcgtggctcctggcatccatctggggtggcccatgaccacccagctcctctagggaatgccgggtagggcagtgaggcaggtctggggactccccagggatgagtctgcatgagaggctgccctcagcaccctgggaagaaatgggctagggcagtatgcaggtggcccttgtgtggaggaagggttgtcccagcttccactccctggcgtttctggatcctgtgccttttttaggtcctgggtcactgggaatggctttgaacctttctccgactgccccatctaatgggggccaagtggctgttattaagcatccactgtaccagggctccctacgggttccctggttagacagtgccacacagccatgggtgtggggcaaggcctgggaggggcgggcgctctgctctaggccacactatgggagcctccccttggggggccaggggctcaaagggcacccgtgcaggtgctccacagcgcctgctgctgcatgagtgtgggaggagtagctctcatcagcatctgagaaatgattgcagtggtggatgtgtggcccatgtgatggttgggagctgaacactccattttatttaacctaaatttaaatagccatacatggtcatggctactgtattggccagcgcctccacattacttgtagcagttacagtgcacagccgagagtgtcatcggttttccctgctctctacctgtccctaggaagttaatttttggagttgtggagtccactgggttagagtcgtggttctgccaagtgagacacatcagggcctatcacttgcccagaggcgcacagcctcggaaaccaggctttgaatcgtgcacctttctcaggtctgctgccagatccctctgactctacccaagttcatggttgcattgagagctatggaggtcaccaaataaccagacttgagggtccaactcctgtgagcctggtctccacagagcacatggtccacattgaggctcactgagtaaggccttgtcacaagctgcaagtggaggtacgtacagggtccaccatgtcctcagccagcctacctgcttccagtgctcatatggaaaggtgcataaacataccacctgggtgtggtggctcacacctgtaatcccagtgctttgggaggccatggcaggaggattgcttgaggccaggaatttgagaccaacctggccaacataccaagaaaacaaaattaaccaggcattgtgcacgcctgtagaagctgaaacaggagggtcacttgagacaggagttcaaagctgcagtgagctatgctcatgccagtactccagcctgggccacaaagaccttgtctctacaagaaaagtgccatgcaggcatgcctgcttgttcagacatgggtacatttgtgcttgaatgtgtgtcacagacatgttttttaccagcatgtacgtacagaccacctgtgcacgcgtctaagtgcagaaactgttcacacatgtgacacgtatgcatgcacactcatgccaccgtcacacagacacatgcacacacaaactagtttccaggccggagactccacacagccctcgctccccatgcacacaggcgcacagtaagtcacagaagccagagcagctactgagcatacatgttggggtccagtgtcagctgggggtagggaagccctggtttctggctcacacggggccccccaaggcccgcaggcaccctggtctccaggccagcaggcccagccccaagctgagtgccaccagcacagctacagctccggccagcaggggcaccactggagctgcagggagaacacgcggggggtgagtgccaggacttggcaaccctccactcccaccccaacacagaggactgtcacctggggggatggcagcctcataggggccatggcaggagaccccatgggcgggaggccgggccggggcagtcagctggtagaagcggcctagtggacagggggccgggcacccggggaggctgagaggcaggggcaggtgggcggagtcattgcggtagaagagggagacggtgacattcctggagagagaggacatggtggcacctcctccctcctgtcattgatcttaaagcctggagaaaagggcttctgactcccacctgtcatcctcccagcatcatcccatgcagctccccacctggccatgccctctgcctgacacatcaccccttgctttgagagttctgtcccacccatgtccctgggcaccaaaccattctcaccctccatctttggcgggattccccaggtgcttccggaactcaaagccgaggcaggcagcatatggcggggtgtgtccatcatagaggcccagggccccctggagggccagcagggtgctgtcatgctgcaggtggacccgagggctgagacggcacttctctctggaggcctttctcctgagcactacacttgcgcatccagatgtcccccaggcttcttagaaccaaccccccaaagctactccttcctcccatcctgaaggcagtaccaacatttgcaggcggccacttaataaagattgctcaagtaggtgcaaaatatgattggactaagcagcctttctcctccggaaggacagactgcttagtccaatcatagtttcttaaagaaaacaaggaattatatttattcataaattcttcctcccataacaccgtcacctccctctttccagactaatggtagagcctgagagtagggtttggagatacgggttaccccaggcagtgggctgagatccactgggaccacaggctcttcctcacctaaatcgctgtcaccctcatccctgtgcctcagtgccatgtggcactgcttcccaaggactcacagctgagtacatgaccatcttgaggggcagccccaggcgctggacccgggagaagtttgcaaggatagcattcagcaggatccctgaggatgggaaaaaagagcttagactctcccagaggaaggcaccccagcctcccagacccacacctcaccccctgtcagctgggccttctctgctgcccggggtgggcccacgtgggctccaatatccaaagccgagatctgggcaagagtccgcaggacatctggggaggcccaggctggtagtggaagaccgtgggcttgctgtggggagacaggacagatggaccatcctgagccctcgagtttgcctctggccccgcaggcctgtgctgccccctgctcttctgagtccccccatgggccggatctggatctggctgggaaatcatgatgtggataacagtgtttttttgttgttgttttttgttttgaaacggagccttgctccatcacctaggctggagtgcagtagcgcaatcttggctgtctgcaacccttgcctctcgggttcaggtgattctcctgcctcagcctcccaagtagctgtgattacaagtgtgtgccaccattcctggctaattttttttttttatttttagtagagacggggttttaccgtgttggtcagactggtctgaaactcctgacctcaggtgatctgcccacctcagcctctcaaagtggtgggattacaggtgtgagccaccacacccagccaacagcgattattagttaataatagacatcgtcattacacagcccagaaggctttatctgaaacccctggggccagaggtatttcacagctcagacattctggactttagaaaggtctgatggtgctgacaccacacagcatggaacacacacagcaagggccggggcagcccccttagtcacacacatcactgctcccaccctgcgattcagaacattcccgtgagctggagtgagcaaagactagcaagagtactagctgggtatggtggctcacgcctgtaatcccagctcttggggaggcgaaaggattgtttgagcccaggagttcctgggcaacatagaccccatctctgcaaaaaattaatttttttttaattagccaggcatgatggtgtgcccctgcctgcctcagctacttgggaggctgaggcaggagaattcctatagccagggagatggaggctgcagtgagctatgataatgccattgcactccagcctgggtgacagagtgagatcctgtctccaaaaaaaaaaaaaaaaaaaaaagcattgcatcatttcaggtcagctcccgctgcccaggttttgggttttctgattataggactgtggggaggagttgccaaatgtgtagcctcaaaccctggcaaggccctcactgtacaccaggcactattgtaagcacagtgcgtggattaacccatttgaatcctcacagcgtcctggggaggtgttgataccggtgttgccatccccactgtgcagatgggaaaactgaggcacagaggattaactacatgcctgagggaacacagctagtgagtagcaagctgggattggaaacaggtgtccttaaacccttggctgggaaggggcagggctcacctggcacatgagggtgtccagaaccttccatgccctgcgcagtggctctccaaccagcgacagtcccgtgaagttctccaggcgactcaggaagccctggatgcgcggggctgggtgagcccaggcccatcccctgcatcccgccccccaccgccgccctgctcaccgtccagccctccagggcctcctggtactcggcggcctcggtggcctcccgcagcagctcgtggtatcggggacagctgcgcatggggaacctcagcagctggggaaaactgagtctcagagaggacagccgtgtgccttgccttgggtctcacagcgggtcgggggaacccgggctctcggcccctgcgtctttgtcgcagtttctcccagatccaggagagcagcgtgggcyggggctcaccctggtctggacagaccagctcgaggacagtcttgcttctcggagccagctcaggcggccagacccagagctgcctctctctccacccgctccctccctcgccacacgtgggtccagccccctgaccttatcctcagccacgggcaccgtgtgcaccgggatcggcctccagcgggcctcggggctccctggagcagcctcgggaaacagcccggcaaggttggcctgggcactctccagcgtgcggtcaaagtccgtgctgcggatgtacacctggagcggggtggagagagggcacgcggggggtcgtggttggggacagaggtcagctgtcgtggcaaatcagaagcctcagattcactttggagtaggggtcagacactgagaatcatgtggccttcgaagttggaagttgggatcaagggtccagaggctaatgtcaggagcagttgggctggacgtcctaagctggacagccatgttggatttagggggtcaattgagtcaatgagggtcaaaaaggaagatcagaatcagtagaggctggaggttagaggtcaagtttaggagggcagcttggaggacttggagtcagagttcaatacatgttcttcagaggttaggaggactgtctgtagctgggggatgtcagaagacataggaggagacagaaaaggtaggtcagaattgataaagcgtagaggttaaaggttagaggtcaagagggcaagttacgtcaacaagggtcaaagatcgaaatcaagtttggggtcaaatgtcagaggccagaggtctgactggagtcaatgggacttagaaaacagagatggaggccagaaaataaagtcagagttgatggaggtcagaggtcgagatgtgacaggttgagatggggtcagaagtcagtgtgggttagtcagtgtatcgggggtcagagattagaggtagagggcaagtcaggttgatggaggtcaaaggccagaggtggaggcccaaagagagcgttgtagtcagtggaggtcacaggtgggaggtcagggggccaggtgggggtcactatggccctacctcctcccgccggtactccggactcaggaaggcctcgtagcggctcctcaggaagcggcccagctccagctgctggcggaccccctcctggggacagaacagcctcagcctaccmctccccacccctcccacccttgccctcaccgcctacccgcttctcacygtggtcagctggcccaggcctcgtggccacagggtggaggccacctccttgtgtgggtccatggggtaggaggccagcggggcccggtcgccatggcggaatacctggggacaggactggtcagggctagccctgggggagctaagggcaggccggggtgggggcgcctcaccagagccacgaacaccaggggtccttctggcagggcccggggtggcagcaccagcagcagcagcagcaggagaggtccagcagggtggccccaaaaccccaggccggccatttccacccagcccagacgctgagctcagcccactgtctgggccgcagccccgcctgtcccagccctgcactcagcacccccattatagcaggccctggcacgctcccccaggggccacagatcccattccccagcgcctctgccagccttggattaacccgtttcatcttcgtttcatcttcatcgctgccccaggagacactgatgtgcttaccaccatccccattgtaccgatggggaaactgaggcacagaagggttccctaactggcctgagaaaacacagatttctcagacaaagctgcgatttgaacacaggtgcctttaacctggttgcagacttggacagagacccccaccccacattgttcgtctcagcaacagtcttgaccccctgagttgcagaggctgacgatagtaactatgtgcttgattttctgtactctgatgctttgacatcaggggccttgctgatcgtagaaggaccacccctcccagggttaccagttcctggagatagtcagggactggcccaagcgcatgcctctcctgtacaaaccagccaacccaccacccaggccaccatccacctgccctgatcacccggggcagggtatcggacaactcaggacagcccctgtgccccagagcctgctgaaatggcgcaaccagccactctttaccctaccttatcccacagaaaacacaaggaagccgcttgctcgtggtctacctcctgggcaccattggtgcgtccccatgtggcccctgtggcatgccccctcctctggggaagctgtgagtataacaagtcatcttcctttctttcttttttcttttctttcctttttttttttttttttgagatgtagtcttactctgtttcccaggctggagtgcagtgacacagtctcagcttgctgcaacctccacctcccaggttcaagcgatcctcctgcctcagcccccctagtagctgggattacagacacacgcgaccatgcccggctaatttttgtatatatatatatatggccaggctggtcttcaactcctgacctcaggtgatccactcgcctcggcttcccaaaatgctgggattacaggcatgagccaccatgcccagccaacaagtcatctttcaatggcaatcgtctgctgctcaggcggcctcaccatcccacaatgctaataaaatctacacttcgcagcaccacctggggctggctggctctcctgcctcactgcgcacagtcagcctccagtcctgtcctaggtttttgttgttttttgagacagggttttgctgtgttgcccagactgctcttaaactcctgggctcaagcaatcctcccaccttggcctcccaaagtgctgggattacaggtgtgagcccctgcaccagatacaaaagttttgtgaatctctgtctctcctcgtacttgaaatagggtagaggcccctggaataaagaagtagaagggctggaggcttaagccagaccaggagctggcagctcacacctgtaatcccagcactttgggaggccaaggtgggagggttgcttgaggccaggagttcaagaccagcctggccaatatggtgagacccacccccccgcacccgactccatctctataaaagataaacaaaaattagccaggcacggtatggtggcatctgcctgtagtcccagctactcaagagactgagatgggaggatcacgtgagtccaggaatttgaggcttcagtgagctgtaattgtgcctttgcactacagcctggacaacaaaccaagagcctgtctctaaaaaaaacagaaaagagaaaaaaatcctgaagcaaaattaagaaactagaaaccacgttctagcccctggagatgtcagcactttcctatctactgatgtattggctgctgtgacaagttaccactcagtggcttaaaatgacacacatttattcccttacagttctggaggttggaagtctaaaatcaatataactgggccaggcatggtggctgacacctgtaatcctgtcattttgggaggccaaggtgggcagatcacttgaatccaggagtttgagaccagcttgggcaacatggtgaaaccccatctctactaaaaataccaaaaaactggccaggtgtagtggcatatgcctgtagtcccagccactcatcgcttgagcctgaagtcgaggctgcagtgagccctgattctgtcactccactccatcctggacgacagagtgaaacctgatgtttaaatgcagtttttcatgtatgtacttcttaccaaaatgagatcatacagaacctgcaattttgtaacctgcgtctttcagttaacctcctcttctccttggcagtagtgctttcgtcttgtctgatacccattccctattcaaatgtccctccgtttctccccaaagagactttgtcttgttttgttttttgagacaggatctcactctgtcacacaggctggtgtgctgtggtacgatctcggctcactgcaacctctgcctcctgggttctgatgattctcgtgcctgagcctcctgagtagctgggactataggtgcacaccactgcacctggctaatttttgtatttttagtagagacagggtttcaccatgttggccaggctggtctcaaactcctgacctcaggtgatccgcccacctcggcctccacccacaaagagcctttataacttgttttgtccaagccaaaacccggtccaggatcacccctcaaagctggtcttgtgtctcttaacggatttttttcaaatatagcaaggctacttgcttttgttttgcactgtggcatggatttgttggagagacggtgccgtttgctctgcagaatgtgttgccttctggaatgttctgggtagtgccgtgaggtaccgtgtttacaatcaattcttgttattcatagtagcgatgttgtataactgtgaccactgaatcagcaaataaggacccattgcttcattaataaaagtatatatttttctatttattttctatttatttatttatttttatttattattattattttgagatggagtctcgctctgttgcccaggctagagtgcagtggcacaatctcggctcaatttaacctcctccgcctggggttcaagtgttgctggtgcctcagcctcccaaatagctgggactacaggcgtgcaccaccatgcccggctaatttttttgtttttttgttttttagtagagatggagtttcgccatgttggccaggctggtctcaaactcctgacctcaggtgatcctcccgccccggcctcccaaagtgttgggaaaacaggtgtgagccaccggcacctggcctatatttatatatatttaaagagatggggtcttacaatgttgcccaggctggccttgaactcctgggctcaagcaattctactgtctcacttaaccaaagtgttgggattacaagcatgagccactgcacccaaccctatatatatgtgtttgtgtgtgtgtgtgtgtgtgtgtgtgtgtgtgtgtgtgtatacatatacacacacacacatatatttccccaataagtgttcacagttgtacaacataactaccaaaaatagcgagactatatctgccacaaataacgcaaatagctacctgagtagcagattgtatagtccccatttttgtggtagcgatagataggtaaataggtatctcacaaatgtatcatatgtattttattttattttttcttagttgttagttgtggagacaggatctcactcttgcccaggctggagtgcagtggcgtgatcttggctcatggcagcctcaaccccctgggctcaagtgatcctcccatctggaggaggaaattttgcctgggcctcccttactgttctcctggcctgcaggctcctgttttgagatatttctatacccagaactgacctggtccctcccctgctctcaaccctctcatggctccccagcaccctccggggcaaaacccaaacacctcagtatggtgttcagggttgagactctccaatctcacacgtcccgatgtcacattcagacaccacatgtggcgggccacaccagggtctgtatctgccctatgcccctgcctgtcccctctaccagaatgccctttccccgttgccatggccaccattctggtctctccgacaaccccctctcggagttccagtggcttctcccccctctggctcagaggcccaggaaagagagagaagaccaaccaaggggtggctggagtcccaaggccatgaactttcaggaagtgaggaggggtctggcagggaagggaggcctggggctgggcagagggcagggaggggaagggtcctgacctctgatctcccccccagaatgtgaccctggccatggccttgttcaccatcctgacctccatctatttcttcaacaaggtgagcgggagaagagcggaggtgggggctgagtctctgtctccctggtccagttctgtcatcttggtctctctttctctcccacatctctgtatatgtccctgttttcctctctcaggctcagcagtgagaagacacaggacctccccgcacaagagccctgcctctccctctgccatcgctctgaggccagataaatgtaactgaatccgcacatcctgctccgccgacccactgcccttgcgcccggcctcgggcctacaccacacctggggctctgtgtttcagaagggagtggggtgggggtccggastccagggtctgaggtaggagagtggtgaggacccaccctcgcaggtttgaggctaggagctgggaatctgcgctgggttttcagggatgagtaggagtctgtggggaaattccaagaagaggaagaacatttcaacctggtgtaagggcacagagggaagaacaagcagggcacattgagcacccggcaccaacacaggctgctgtgtacttcggatttgttatttcccttgatcccgtgatttcttctccatcagacaaaggcgaaaatctttgtccaatgggccccaaaaaaccacagccagggcagccagagatccaaaatgtgaatgcactttgtcagctgcagtgggtctgtagttatcgtcatcatcttcatcactgtcatactgtatcaacacatcttcctcttttttcttttctttttgagatgagatctcactctattgcccaggctagagtgcagtggtatgatcatagctcactgcaaccctgaactcccaggctcaagcagtcctcctgcctcagcctcctgagtagctgggactgtaggtgttcaccaccatgcccagctaactttttaattttttttagagacagggtctcactatgtcacccaagctggtctctaactcctggcctcaagcaatcctcctacctcagcctcccaaagtgttggaattacaggtgtgagccactgtgctcagcctcttttcttaacaaactcctatttaaccttcaacacccaccagcaatgtcccttcctataaaaatgtgcagacccgcccccacaggcagttcgctagcagcccccttgcttagcgcccttcccccaccccctgcctctacctccagcatcctcaggtcaatgccctgggggacacttccaccttcaattgcatttcacctaccttctcatctagtcaaaagcaatttcatttcagctcaatatctgaaaagccagctttggagtagggttgactgcacgtgctaggttttcctgaaaaagcccaacaaatttccttccatccctcccttccttccttccttccttccttccttccttccttccttcttcccagagttttgctcttgttgcccaggctggagtgcaacagtgcaatctcagctcactgcaacctccacctcctgggttcaagcaattttcctgcctcagcctcccgagtagctgggattacaggcatgcgccaccacgcctggctaattttgtatttttagtagagatggggtttctccatgttggtcaggctggtctcgaactcccaacgtcaggtgatccacctgccccagcctcccaaagtactgggattacaggcatgagccactgtgcccggcctcaccaatttctttttattttattgtattttatttgagatggagtctcgctctgttaaactcaggctggagtgcactagcgcgatctcggcccactgcaacctccacctcccaggttcaagcaattatcctacctcagcctcccaagtagctgggactataggcacccgccaccacgcctggctaagttttgcattttttgtagagacagggtttcattatgttggccaggctggtcttgaactcctaacttagtgatctgcccgcctcggcctctcaaagtgctgggattacaggtgtgagccaccgcgcttggccccaaatttcagtaataaacattcatagttgcactataattttatctcgaattaatagaagttttgtggatcaccaacattttaggctaatgttttagcgtcagtggcatagtgccctcctgaagttctcaaaagcttcccgatttggaggctggctttactttcaaattcttggctgcaaaactccaaataaccacatagtggcggtgttgcactattttctcagccagaaattggttgccttaagggttgagcgcaagaaataactttggttttggcaaaaccacaactgtttgtttgtttgtctgtctgtctgtctgtttttgagacagagtctcactcaaaaccacaattttttgagaccggggggcggggggtcctggccacttcctccctcctccctgcctgggcttcctcccccactggaccctcaccccagccttctctctctctcctccagtcctcagaggggtcctccgggacccagagctgaccctgtccctttctcctcacagccctccagtggccctgtgcccccacccaagataagaatcccaggccctccactgagcattggaggctgcatgtaacctgaccccctccaggcttaaaaaaaaaaaaaaaatctcacccacctcccatgcccaccctggtgtattcttggccacggcgaactcgaagatagtcccaaatgcagcaccacgcgtttgcactgctgggtcccagcctggaatgccctttcccatgtctttgtttgtttgagacggagtttcgctctttcgcccaggctggagtgcagtggcgcaatctcggctcactgcaacctccgtctcccaggttcaagcgattctcctgcctcagcctcccgagtagctgggattacaggtgcccaccaccatgcccagctgatttttgtatttttggtaaagacagggtttcaccatgttgaccaggctggtctcgaactcctgacctcaggtgatccgcccgccttggcctcccaaagtgctgggattataggcaggagccactgcgcccagcctcccatgtctgttttgtgtcacttccctacctctcccctgaggcttccttgaacgctaagcaaagtcagactctcctgtctgctgccccaactttgcctccccttattcccggctgtgacagggagcttcagggtggggtcgctctgaacagcatctgacccctgctgaacccacagttggggcttggctgtcaacgtttgggaaacactttttttcattgtcgttagctaccatttattaagcacctcttgtttgctaagccaccatgcaagttaccgtgcagtgtgttttatgaggtcatctctacacccagtcctgtgttgagcgcaggatgggggtggggggtgccatggagggagcaaaaaaaaaagacaccattcccacccttaaggagttgacagtacatggaagaagataacatcaaaccttacatttgtgcaacagttcacagttttctttttttttttttttttttttttgagacagggtctcactctgtcacacagactggagtgcagtggcgtgatcgtggctcacagcagcctctacctcctgggttcaagggatcctcccacctcagccttcctagcagctgggaccacaggtgcacgccactatgcctggcaattttttttttttttttttttttagtagagatgaggtctttttatgttgcccaggctggtcttgaactcctggtctcaaacaatcctcccaccatggtctcccaaagtgttgggattacaggcatgagccacagcacccccaccaccactaacgaatattgacaacaaagctggtctttgcattttcaccccagtttcccatccgcaccccagggtttgaaccactcagtgctgcctttctcagtcctctgggagctatcaaggttggattttctttttctttttcttttttttgtttttaagacgaaatctcgctctgtcgcccaggctggggtgcagtggcgcgatctcagctcactgcaacctccaccttccgggttcaagcgattcttctgtctcagcctcctgagtagctgggattacaggtgccatcacacctgggtaatttttttggtatttctttttctctttttttttttttttttttttttggaaatggaatcttgctttgtcacccaggctggagtgcagttacaagatcttggatcactgcaactttctttcacctcctgggttcaagcgattctcctgcctcagcctcccaagtagctgggattacaggtgtgcaccaccacactcggctaattttcgtatttttagtagagacggggtttcgccatgttggccagactggtctcgatctccttaattcaggtgatccacctgctttggcctcccgaagtgctgggattacaggcttgagccaccatgctcgcatttcttttttcttttgtatttctagtagagacggggtttcaccatgttggccaggctggtctcaaactcctgacctcaagtgatctgcctgcctcagcctcccaaagtgctgggattataggcgtgagcaaccatgcctggcccgaggttgtattttcacaaccacagagagatgggtctcagcccagctgcccgcagaaatccctggggaggtcttgaaattcccagagccgagctccaccctggaccacttaaaccacaaggtctggggatggggcccgggcatcgattttattttaaaagctctccctagagattctgctgtgcagccagggtcaagagccctcgctgtaatgcgttcccagaagacagaggtcgattttcctcctcttggagctgagtgcatttcagagggagctccgtggatacatcaaagactcaaaacatggggccaaatttacattttagtttggaaacattcaggagcttgaaaatgaaggaacgtgaagcacattgttccccagggcagagggcctggtgcgcatggtcggaaggcacttgcatatttcacaacagactccttcagaaaccagaaaagccggtggcctgctcctgtccctcattctgtcccatgtgcgaggaccagcaagctctgtttgcacacaagtagagatggggtttcaccatgttggccaggctggtcttgaactcctgacctcaagtgatccacccacctcggcctcccaaagtgctgggattacaggcgtaagccaccgcacctggcctctgaggcgtttttgagatcagggtctgggcctgtcctctgtgggtccccagaacctacgatcacaatgggagtcacacattgaaaatggggctcccattttcaagggagtgaatcactgacacttagtaaacccagatcaatcagcgtgagactgtatatgtgcaaaggggcatcgttcagcactgggcgcctcccaggcacgggggacacggcagcaaagggaacagacaaaaatcccccaccatggtggggggacattaggtgtggctgtcactcccccaccttttccttttattccacttgaacaagaacggaaaccaggaaacccacaccacatctggtggttcgtggggaaggacctgggctctggactcccacggttctacattccagtctcggccctgacatccacgtcctggctgggaccttggcccccaggagctgctgtgccccagcagagctgccgtgagcattggagattacggggttgcccgtcaccaggagcagaacctacaactctgcagccacgcggggagggtttcgggagcacggggctgggaaggtgtcaggaggtgaggattcccatgacagctattttccgacacttgatgacagtctgtctcctacggctgggaacatctcaaaccaggccacgatgggggtgccgcctcccctcccgtattgcctgagagaaacggaggtagtgattaagagcgcgtgattacctctcctgcctgggaggtgaatgtctttctgtgtaatcattccgttcagaactgtctgcccccaggctgcgagctctatgagggcagactccattctattcaggcatgttcaaatccccagggtggcagagatttgcacctactatgagctcagccaatacttgtagggacagggtatagcaaggaggcagaggctgtagaatctgaaggatggagagtgtcagccctgccctgaaatgtcagtttctcccctgcaatgttagcctctcccactgaatgttagcacccttatttgaatgttagcccctcctcctgtatgtcaatttctcccctgcaatgttagctcctccccctgaaatgacaatttctttcctatgatgttagctcctcccttctgaaatgtcaatttctctcctgcgatgttagcttctcccctcttaaatgtcaatttttctcctgcgatgttagcccctcctcgttgttagctcctccccctagaatgtccatttcttcccatggattgtcagttcctccccttggcatattaccccctccctcataaaggttggcccctcctttattgcctgagagaatcagaggtagtgattaagagcatgcaattaccctaaaatgttagaaacagaggtagtgattaacagtgtataattgtactaaaaatattagcccctcctcctgaaatgttagctcctcctccctggaatattagctcctccccctgggatgttagtccctcccctctgaatgtcaatttctttccctggaagatcagtttctccctttggaattttagccccgcctcctaaagttatccactccccctaaatgctagcccctcgcccttaaatgttagccactgcccccggcatgtcagtgctactccctagaatgctagtccttcaaaggtaggtatctttgtcttctttgcctttctcccacaccaaaaacagtgaccttcaccagacaggcgctcggtaaacataactggatgggttaatggagtcagaccggtcaaattcccatcctacacttacttgctttgtgactttcttcttttttttttttaagacggagtctcactctgtcgcccaggctggagtgcagtggcacgatctcgactcactgcagcctcagcctcccgggttcaagcaattctcgtgcctcagcctccagagtagctggcgttacaggcatgcaccactacacccggctaatgtttgtatttttagcagagacgggggtttcatctttggccaggctggtctcgaactcctgacctcaggtgatccgcccccctcagccttccaaagtgctgggattacaggcgtgagccaccgtacccagccagctgtgtgaccttcggtaaatgactttacctctctgagcctcgagtttcctcctctgtacaacgggaataatcgcagcaccgccctcagggttgtgatgctgactttgggagttcacatgtttagaaagctctggacagggcctggtacttaggtcacgatcaatacctgtgagctgtcattatttaagggatgaaggcgtgaatcgcagtcttcagctgtcttagcaattctgttggatacgaatttttagtccctgcttggcagagtataatccggaggcttaactcaccttccacgactctctctcgccgaggctgcccaggaaaatgccagatcctctcaagcacggggccgtgcccagctcccgcgcgctccccgagactcaaacccacctccaccaccgcgcctggctctgccccagcaaagaccacgtctccccagggaggatcctgcagccagctctaaaaaccgcagagcctccttggaagaatgctgaaccgcattcattagaaaatcaatgcaaattaaaaacctccccgggatcccacttttctcctctgagaaggcaaagatcaaagaggctgacttggcggttgctgcgttggcgaagccgtgggaaacaggcttgcagagcgctcgcggcggcgtctgcgacatcgaacacgccctctaacccggcagttccccaggaggaatttatgcaacagaggatgatactgatcacagcaaacacatcgcacctcctcggtgccaggcacggagccaagcgccccacccacggcaacgcaagtcatcctcacagggaccctctcagggagctactgccattatccccattttacattggtggaaactgaggcacagagagtggaagcaacttgtgtcccattgtgctcttctgccttcttgaagcattcacaaaagtacacaaacacaaacgtaaaagaatattattgttggttttgtgtgtgtgtacctgtgtgcacacatgagagagagacagaacatggaaaagagtatttctccttccaaagaaccagcttcttactattgtccataattttttacttaaaattaactccctctaatctctatgaacgctttctttcaactttcagtgcactattttatagcttttttttcttcctgaattgtttgctttgctaatttcctctcggactttctctctctctgtctctctctctctctctctctctctcttctaattacaattaaattaaag

SEQ ID NO: 95105 - DNA, 159763 bp, Homo sapiens
tgtcaaacaagagcttttcaacaagtggtgctgagacaaccccccataccaatgtgggggaaaaaaaaaaaacttgacctctactccataaacaccaaaatcaattccaggtgaactatagatataaatatgaaaggcaaatcgatatagatatgaaagtcaaaaaagccttataaaaataaggcttctagaagataatacaggagaattaccttcactacctcaaagcagaaaaagatatcttaaacagaacacaaaaaatgtcaaataaaggaaaaggttggtaaatttggtcacaatgaaagttagatctattgctcttcaaatatcactattaggcaaataaaaaggcaaatcacataatgaaattagaaatttgcaatacatctatctgaaaaaggctcatatctgaaatatataaataattcttacaaatcaataagacgatgacaggtaaccaactgaaagatgaataagagccttgaacaggagtttcacaaataacgacatccaaatagtcaacaaacacataaaaaggtgcttgatctcattagtaatcagggaactgcaaattaaaaccacaataagataatagtacacatctaccagagtgactgaaactaactagattgacaataacacatattagagcaatgggaactttcatatactgctagggcagcaaattttgtaaaatccctttggaaaatagattggtgtttcattatctattacagttaagcacagttaaacatatgtacactttctgacctaggaattccactcttagatggatactcaacagaaattcacatgcctgtacacctagagacatctacaacaatgtgcatagtaacgcctatccatagtagtatgaaactggaaacacttcgaatgtccatgtctattaattgtcgaaaagataaactctgatatatggatttaatagaatactatacagcaaataaaataaatgcacaactacaacgttattaaaactcataaagataatgttgaatgaaagaaaccagacacaaaagaacatatcataatcttctatttatataaatgcaaaaaacaggagcaggtaaaagatatatgcttagttgataaaaccataaaaaacaaacaaggaagtgcttatcatacatctaggacaatggttacctttggtggcagggagagtgcataaagtgattgggagagagcataagggggacttctggattctgtaatgttctatttcctgacctagatggtagattaaaggtgcttgatttgtgataatttatgctttggttcacttttctctgtgttatatttcacaaaaaagggtataaaaatccaagaattcctatatttagggatcactcagaagctcagaagacaagtaatgaaaatcagagcaataaagaaatttggtgcatgattccaggagttaatctatcctatttagacttttttttgtgcctcaagttagaagatgtcatgaatgcaaataaatccactccattgaaaattacaggtcatacattcactgcttgtttctgtgcatgtggtctgttctcagttaagagccaagtgtcccaggactcagaaaggacaggtttgttgagatggcccacctaaaagtgatattcactgaggttttaatttttgtggaaatcacaagaatctcgatggacttggcttcatatgaaatatctgttcctctggtagcatgaattcagggtatcctgcttgggttctacttttgtatggagaggtggtaggaaactcttcatcaaggtcaccttcatccttattcccactaatagtattacataatttttttcccacttacggactgacttctaactagcctgattataccatgtaaatgaggcattggcttaaacacttttgcatctcatagcacctagtagtgaattaggtacatgataggctttcaacaaatgcttttaccgtctatatgttttcattattgtacacatatttaaaatatatacaatcagtagttttcctactggtacataattttggtttacattaagcttttcatcacccagaagaaagctttttgttactctgttaatatctgcaaaatttataaatttttgccttctgagagttggcaagaagcatatctataacttaatttggacaaggaagcagttaactacatttacatttaaagtattttagtagtgtcagattgagcactccagggagtcaggcaaaaattaacagatccttccaagcttgactggatagtgctcgaacaatcgcttaagatctggagatctagcacaaaaatcaagtcctcctcattgtctgccttttctcagaaccattaaatagttattttacattagtcaaacaactcttagaatgtcttaacttttttacagagcctgtgttacaaaggaggtggtgaatcagaaaggaggtaactgcataggcttggaaaccttacggaaaccctttttcttaccattcccaaaacttacctttgacttgcacattacatagaaataaacttatttctgatggttggatctgcaagatggcttgtaaaagcctatctaatccataatgtactggaaatggtattattttgaccacacctaatcatttatagcatttttttttctgacaaaaatacatttacagccctaggtcagtatgcaagggacaaatacttctcgcatatttttcttctccataccccagtgtgggttataacagtagtatgggaaaagtaaggttgatatctccaggcaccagtaacttaaactctacaactgtgctatcaaatatagtcaccatgatccacataaggccatttaagtttaaattaattaattaaaattaaaaattcagtttctcagttatcctagccacatttcaagtgctcatagtcacatataactagcagtgacagtacagatacagaacattcccatcatcttggaaagtgctcttctatgaggtaactttctacattaaatattagctaggcattttcccttccttccttccttctttctttcccttttctttgcattttttttttttttttttgacaaggtctcactctgttgcccaggatggagtgcagtggcacagtctcggctcactggaacctccattagctaggcattttcacatgggggaaaagaggaaaacagttcctatggggactgtggctcagtgtctctccccagattcaaagtgacgagtcacttataaattaagtataagtctcagattcttatgtgggatatgaactctgtcttcatggagtttatggcctactgggagtaacagacatgagtaaatgaaaagttaattaacatataaaggcagtatatgataaatgataagcaagaggataaattctcagggaaagaatagatttaagagacacagaggataatgtactgttgatgtacttaatataaaaagcaaaagaggaaaaggctgaaaataaccctgaggttgatggaacaggatgacagtggcactttggtggactatagggaagcataaaagggaggggaaaatgagctcagtttctaccccattcaaggaagcacatggagaatcacgggattacattcttgcaaaaacaaaaaatgacctactgtatcaaaggctacaggacatctcaattcaataactgataggtctagacagctgttatcatatttctctgcaacaacttcatcagtgacatctgagattggattctaaagatacaggaggaagtaaaacatgaggaaatggaggtaatgcctagatgaactgaggggatagtatacaggaataattcttggctcattaattattggattgagccacctccatctatctgttttggagactgctttatcaggtcagaggagatgagtgtgactttcttcagattgtgcaagacaaaaagaacaccattagaattatgtacatgacactggaaggcaaagtgggttttaaaattttaaaataagagacaattcctctaattgacaacaaaatcaagtaaaggaaaggaagctaggatttttcttctgttatcaaacatgtaggagcatatagccacttttctggtcatcagttgaatactgaaaatgtcaatcaggtgcaacttctttgttgtgagggtaggcaacaaagtatgcaaaagccagaaactagtggcttgcaggctttgatatttaattttacaagatcaactaaagattctcttttttcagtcataaatacctaggaaagtgctatatgtgtttcatgttcttgcacctcatgaatgaggtcgtgatagctgtggtgacaatctctgaaattcttcccagaactcaatccttaagaaccaggagtatagtttataattaaagtgaaaatttattttagaaagttcaattttagaatctataaaataaaaaacaaaaaccccaagcctacgtaagtaattttaacgtaaaatgttaatggccccaaactctaatggtggaataaggacaataacatgaagtatatgatatttgagataaaatatagctatttaagaaaagcttcttactctccttgagccttcatctataaaataaggataataaaactgtgtcattgtgttactgcaaagattgattaaatagatacgtataagatgcctaggttatggccattttttatatttaacaaattcctaattctttcttgtttctacaactgtactaaattattttaatagctgcaaaagtattttaacatattgactaaccatttctctgttgctagacatttggactgttttcaatggtttggtatctcttcgtatataaatttcagaggacattcggacctcctgtaaaggccaggtaatacatattttggggcttctgggaccacataaggtctctgttgcatattcttttaaaaaatttcttgttttcttttaacaacccttctcaaatacaaaaaccattagcatgagggctgtgtaaaaacaggccacagactagagctggccctccaacagcaatttgcttagcccttaattgagagtttttaaccagtctgggcctctttggaagttcactctaaaggcataatctcaattttagaagctggcaacacccaagagagcaattgttagtctctagtcccatggatgtggtgttcttcagattcctctgccaatatttttcttgttaggaaagcatgatgtgaaagtggtgacaggatggagaatgacaatggccagtgtatgtgagtttttgtctaagctaattcttacgcaagacaccggctgaaaaacaggtgaggagcacttttcacgtgctatcttccagaaatgaattcaatctgtaaataactgagatgtcttcacagctcttgggtaatttttgtctgtagcaataagaaactttatctctattaaagttaggaaggggttaggatccagtaatgaatgaaatgagaacttaagttgcaactcagtttctgtacttacttgtgatctagcattaaacacagtgccaggcacgaaataggtggtgagaaataagaaaatgatagagctatttgctctaatggttagaggcaatgatggtcagctttgagttactttggtgaccccgcagggaggaagagcacaggtggaacattagaatctctttcaggaaaaggatgccgctggatccatcaggtccagtagcactgcccatttctcctgctccaaggcatctgccctcgaaagcccccaggccacacccgaggacaccacccaggattctaggacacctcgagggcggacgtggtttggctctcggtccagctggaccgggctgggccaaccgggagtcagctcgaactcacctgcttggcaggtgcgcgcttcccgaggcgtgacaagggagcgccggcgcggtgggtggggggcagagaatgtgaagctccagacgcatggcacccgccgccaagtcgccgcggtggctgccgggatgcgccgcagcgaatggtcgcgccgggcgccgctctgagtgacctttcacccgcgcccagcggttccgggcggcagcacaaggcggtagccatggcggaggcggcggctgcagcgggtgggactggcttgggcgcgggcgcgagctacgggtctgcagcggaccgggaccgggacccggacccggaccgcgccgggcggaggctgcgggttctctctggccatctgctgggccggccycgggaggctctgagtaccaatgagtgcaaagcgcggagagccgcgtcggcggccacggcrgcgcccacggccactcccgccgcgcaggagtcgggcaccatcccaaagaagcggtgagtagcggtatgtggaaggagttagcgtcgagggaccaggccgggcctgtgctgcaggagggcacaggcgaggtgggaagggaagtgacacgggtgggcggaaggcatcccggtccctgaaagtagggacccacctctctttcgagagagtggactagaccctggattctgtcaggaagggggcgggatgggatggtggattttggtcactatgtgagggtaacaggcttgaagaactctcgttggagaagggtttaaaggattcctttttcctgagcttttagtgccaggaattcattttttatcttgaattaatacttttggtgctgaggtcttggaatgggtagcagaggttctatttttctccgaggagatataaatttgtactagatgatagatcataggaatctctctcattcgcgaaagcctgctgtgggggaaactggtggtgccctggaaaaaggtgctgactggtttctgtggggtaagttccacttgcttaggatcaagatgtattgactttgagggaggaaaccgatgaatggtaagaagccataaactgcaaacactagctagtggtttaaggtgtggtggtatagctactgagctctgtgtaaccagaagctaaaagacaagagtctaaccgatgagggatgtttgtaagagaccttgactttcgatgtttttggagaaatctttttttttttttttgtatttttagtagagacagggtttcaccgtgttagccaggatggtctcgatctcctcaatctctgatgaaggctattaggagaagctactttctgacgtgtggctttgtcaccgtggataaatggataaaccgagagtgaaaaaaataagtagctaatgtttaaagtgtacttttaagtgtgccaaagtgtgctaaatcctttgtttcttcccaagctatgaggtatgtgcggttttctcccattttacagatgaataaattaagtctgctggagtcttagcagatatgctgtgtgacaggttagaatttgaaagcacatcaaattgacttcatggccaagttcctaagctatacttgcttctgatgaattaattcaacatacatgagtctttacaaaatacacactgtaccagcaatacagaaatttaaaaatacggtatttactcttaaggaaggaatagcttagtaggtaaaattataatacagcgttataagaaacttaactgggaactataccacctggtcatttaacccagttttgggtttgtgtttgttagtgcaaagatgttccaaagtaaagattgtctgagtaaattttggatgtttgcattactaatagtttgccaaagggggaaattgttcttggcatacaaacagtatgttcacaggtaaagaagtgagagacaaattagggaactgctgagactcaagtgtagtaggagagggtgagaatgacaggggacgaagactggagaggtgaatcttgtttacaggattttacgtggggcaatacatgattagatttacctttgataaaggtcacactgggagcaaattgaagacagttgagcattttggcagtataatggctgggaacatagacctggatttcaatttccactacaccgttacagctctatgatcttgggcaaatcacttaacctctgagagtttcagtcaccgtcatttgtaaaaacgggaacagtaatcctgttttgcagtgttgctgtgagaattgaaaaaaatagagttaaatgatcaagtgtttagtgcaatgcctgttacataacctttcaaagaatggtagctgcaattttcacagtgtctaaaggcagagagactaggagactattattccagggagaaatgctgggattctgaactaaggcatattattgggagtaggcaacttaattgagaaaatgctaggaggtaaattttccrtaacttggttactgagtggtggggaggggaggaataaaggatttcatctcgtctcctggcttcaattgaggttatattattaatagctgtcattaggtttaaaattttctaaatggtttcatgtacatttatgtgttctcatttgtatgcatatatgtgattgtacattttatgtagattcacactcttagaaccaagtaaggagggcaggttttccttatggttagatttaatggcttggtttacagcattcagagaaaaaatagtaacgtttgtaaggcacaccaagatgatggttgaaggtgactggtcagggatgccctgtgtggctgctccaaggactgaaggcatcgatagttcaggcacgactgtaacccatttgttgcataggttacagctggtgggaagccctggtctttggttcggggttagacgactagtggtaaaatctagtcctgtactggtactttgagattttcatcaaaatatgagggaacacagaaacttgtattagatgacacatcaaaagcttccacagagggtgatatacttgatagataatcatgaggaacccaagtctcccttctacttcctacttagctgggcctgcagttgccagctacagaatccagcctaaagggaagataaatgatagaggaagaaggaaccacagtatatatctaataaggtgtgagtatgcctatatgtcaattattttggaataattttgtgatttgtgtattattccttcccttttrttactttggatgataacattgcttgtaattgttttatcacatggttgttttatcacatggttggttatatcacatggcctggagtagtgacttcttgaaatgccatattttcattcctgttacagaatagtcatgcatatgtttcaacatttatagagtagttgctttatgaaggtcctgtcctaggcattggaggtaaagagatgaataagtagtcttcagcctcaaagagttcacaatctaggaagtgagagacacagtgcagtttgattagagccactgtagatacaggtacaaatgtagcacaaaggaaagactgacttactctatatgggggtgggagggtgggggtggtcagaggaagctttctggagaagattttaaaatgtggatggtattttgagagtttatattccaggcaaagggaacagcatatgacaaagcaaggggccatgaaagtgcatatcgtatttacataactaggtgatttagtattggtagaggtgagaataaaatgaaaggagggcagtggcaggtcatggaggtctttggcttgtgggttatcagtccattcgttcatgcattcattcatgcttataaaatatagcagtgaacaaaaactctgccctatggaacttatattctagctggagtggagacagtgaacaaacaactaatatagtatgtcaggtagtgataaatataaagaaaaatgaagcagctgaaggggcttggtgatagagaacccttgaaggaattaagctgggaagagacatgatcagattgggtttgggtttgagagaagtcactccagctacagtgttaagaatggattggagaacggtaaggatggacatagatcagttagaggagatcagttagaggaggctgttgtaacacaataggcgagaaataatgaagaattaaactaagatgatggcaatgagaatagggaggaaatgatgtgtgtgagagttttagaagttcattaggtgacaccattaaagtttaatcacactttaaaactatgtaactaaattaatgccacaggagtttggagactgaatgacaatagaaaagggatgacacagtccagaggaatgtggacatttcagagggctgaccaaacaaaacctgctgtttacttatcacatggtctcctatgaagttggcaccaattacttctttttcttttcttttttttttttttgctatggagtcttgctctgtctcccaggctagagtgaagtggcgcgatctcagctcactgcaacttcctgcctcccgggttcaagcgattctcctgcctcagcctccggagtagctgggattacagagcctgccactgtgcccagctaagttttgtatttttagtagagatggggtttcaccatcttggccaggctggtctcgaacccctgacctagtgatccacccacctcagactctcaaagtgctaggattacaggcatgagccaccacgtctggccggctccaattacttctatcccggaacatatgttctcattatttgaagttgctgagcagagtattgaagtgacagtttactcttggatcctccctttttccttaagtgcatgttacccatgtacagtttttcttttgactttgcttctaagtgcaattttagatccttaaaaatcatagtaaatgtcaattacatatgtgacacttttacgtcttggttttggatttttttcagttttttttttttttaaggctcttgtggtcttacgaaaaagagaagaaaaaataccatgttaactttcattcttccacactgctaacctctttcccagttataactttggctccaacctcattgtggtttgcattagtcagaactgctcaatggcagtttttacggaggttataaatgttcaggtcaaaagaatgattaagaacgccactaattgtttagtctacttgcttataatgtcacttacaaatgccattttaataaaaagcagtatattaacgtcgggcatggtgactcacaccccataatcccagcactttgggaggccaaggcaggcaaatcacttgagcccaggaattcaagaccagcctgggtaagatggtgagaccccatctctacaaaaatacaaagaaagttagcctggtgtggtggcacaggcctgtggtttcagctactggggaggctgaggcgggaggattgctttgagcctgggaggcagaggttgcagtgagctgagattgcgtcattgtactccaggctggacgacagggcgagactgtgtctcaaaaaacaaaacaaaacaaaaaagtattatttaacatctgccggaagctttggtagatattttccagaaggaatacagctgagttaacctcttgtaaatatttcccaagagggtatcctgaagcctgtaagagctgatacagagcaaaggttatttgcacaagtgacctggcttaaaacttaacatcgtttggcaaaattcgagcttattttggtagttatgttgaatgaaatatttaccctattttgagttcctagctaggaattctagtgatagtagtaataggagttttaattgactaagtcctaatatgacaggaaccatgctaaagcttatgtacattatgtcatttaaatctcacacaacagctctgaaaaatgagtgatactatatgtacattacagttgaggaactagaggcttagagaagttaatttatctaaggccttgcatttgtgaaatgaaagagatggcatttcaactctgttcttgctccagagtccatattctttcctctatgctggattaccacatctgatgttcccggggagatatctacttactattcatcaagttgctgtctttgtcatgctaagtttcaaagtttttgtgattaaatagatcatgatcaaatactttgtcatatagttaagaaggcattagtttatgttgtacttaataaattataaaacatcattctgtcaaaatgaaattcataataagaaaatgtaatgggtggtttaaaaaggtagaccagccagtttacttttgtgagtgcattttgccatttgacttgtggaagaagacagtgtttggaatgaaagggaattaggaagaatgtggaagacccaagatcagagaagaaaggaggaaaagagaataggtcatggagggtttactgcctagttgcaaactgtctttggactgtgaatgaacaggaaactgaagatttaatcgctgtggttatttgttaatatgcttctctagattgcattttaagatggaccagaccttctctacatagacttttttatgttgggaagttactatagagccatctacccttgtggtcatttaataaaaatacctgagaatgaattaagtgatctgtttttaggctgcagagaaatggattgctgttgtagtcagatgagatactttatggaacactttaaaagcaagtgctaagcaaatattactccgtttgattttatttccttattattgagaagataacttctgctgttattccgattagtatgttaatttcaaccctaaaccaaatcaagggatcatgactagagtctaccgttgtagcataaagtattaatagctctctgcctattagtgttctctttatttgttgggtcttgggggtgatattttgtcatatccttgtcccaacatctgggctcagaatcaactgagagataagacacaggatacagacagagaggtaaaaacattagcttttttactgataatgctggttggagatcgtggcttagatctgtactacctaatatttaccctgaattacactccatcacaggcagtgtaccacagaaggcctcctctgcaggtgtagagcctaacacatgctaccaaaacagtagagagagaacttacagcataattaayttttgcagaatgaacacatctattttatctgtatttagattaagaaacagcattaccagtactctaggaagccctctttgtgctcatcccagtggctccttccaccaggataaccactaccttgacttctaacatatagatttgcctgtttgaacttcatgtaaatggaatcatacagtgtgtacttttttgtgtttggcttctttccttcagagtattatgtttgtgatattcctccatgttgcatctagtcacattttgtttatcctcatcgatgaatagtattccattgggtagatatataccacaatttatccattctgttattgatgaacatttaggtggtggttacttttggtccgaataattacttgttttaatataaagtgcatatcaaactagtgtttttatagatattactgcataggaagaggttaaagtaattaaaatagtgtttaagaattaatatatttacttttcttaagtacatcaattgtttgaggtaataaacagaatgctcccaggtactaaatcatttttataaataaattaaattggatttttaaacaaagtgaccttgcagtgttcacatattatttacgagcttataagatttcagcttaaaatcataagtccaactctattactcaattacacattttaaatttgagttacaagtcagtcattcttaaagactagattctcttaagttttgtaaatatataaaatatcaattttttgtatagttttcttaaaaacattaacatctgtctttggttctcttaagcatttgtatatttaattctggatctttcagtagttgaaatacgcttactcattgaaaaaaactgctactattccagtaactgcagttacttttgatgagagagttttgcctcctgggtgagattcggaggggtagatatcgtcttgtcattcactaagaaaactgttatatgattgcatataacatttgttcttgccagcatgtttgaaattactaatcagagatttggccaggttgctgaccagattcttgttgttgacctcagtgggactctccaaattctatttatagttgctgtgtcagagacctcatcctataagcaggggaatgctcaggtatcccaggaccttagaatcaagtaatgtgaactatttaatttgctataatcacagaagttcgcatttccaactcagattgattacctagttgggttttacattttttctaaaggtgcttgaactaactgtataggaatccagcctaaggaatattaaaatgacacctacttgaattctcttatcactttagtcacatatactatggagtggatattttgctgtcaactcaaattttgtaggtcgacactatccagtagagctttctgtgatagaaatattctgtaatctgtgttatccagtatcatagccactatggagctgacttttaaattttgtttaattttaatttaaataggcacatgtggctagtgatataccgtgctggccagtacaggtgtaggtggaaacctaactcattatcttctttctcattctctagaacttatttatctgggctttctcatatctcatagtgttaacactagtcccacagtcacatccttcaatccctatcttgaacttcttttcattcttttaagatcgaactttcttttgaatttattcaaattaataattaattctgcagtcactctgctgctctcatacatgtttgtgtcatctgatcctcacaactgcccatttcacagattaggaactgaaattcctagatacttgccagaaaaatatattagtcagtttctagctactgagtggtaaagcttaaatttgaatctagattttttaattttaatttttttttttttttgcgacagagtctcgctctgttgcccaggctggtgtgcagtggcacgatctcggctcactgcagcctccacctcccaagttcaagtgattctcctgcttcagcctctcatgtagctgggattacaggtgcacagcaccacgcctggctaatttttgtatttttagtagagatggggtttcaccctgttggaccatgctagtctcaaactcctgacctcaggtgatctgtccgccttggcctcccaaagtactgggattacaggtgtgagccaccgtgcccggctgattccagatttttaaaacatctcaattctagagctttttccttgatattatattgatatcacccagccctgttcattttttccttcacaatctttcacattcattttgtgcattaaacaagtatttattggttacttatgttctaagcacttgggctatgtcagtgaacaaaatggagaaagatttttattttcttggaacttacattccagtgggtgaaatggaaaattaaacatagtaaataagtaaattattaagtatgttagaaggtgataagtactgtagaaaaaagaaaaagtagagagggtaaggaggtagggttcaaattttaagaaggatgtcaatgaaaacatgacatttgagcagatatttaaaggagatgagtttagtcatatggatatccaggcaaatgagtgttctaggcagaggaatagtatgtgcaaatatcctaagaggaaatgcacatgtggcatatcaggaaagccacaaggagactggtgcagctggactcaattcatatcccctcacctctaaccgctgtttaaaatatgtagcttttaaacttcagcttctgatttacctagctcttctactgttctaggcagagtctcttattcatgccacatttttcagcttttacaccttttattgtgccattgtctggaagacctttgcttgttgattgatcccatgtttcagagtctcttgttttggggatcttttctttttacttttgagaactggggaagcattgatctatctcctgttaccttttccccacgatttctcaggttatgaagagtaactttaaaacatacggttaagtgctaagtgtcataggatataatatgtaggtctagagccttgaattcatttaaatcacctaggtactcttcagccacctcacccatttgaaacttcgtctacyggctggccgcggtggctcacgcctgtaatcccagcactttgggaggctgaggcgggtggattacctgaggttaggagttcaagaccggcctgactaacatggtgaaaccctgtatctactaaaaatacaaaaattagccaggcgtggtggtgcacgcctgtagtcccagctactctggaggctgaggcaggagagtcactcgaacctgggaggtggaggttgcagtgagccgagatcatgccactgcactccagcctgggtgacagagcaagactctgtctcaaaaaaggagaaaaaagaaaaaaagaaacttcatctacccaggtttgcaattactttgtgwcttccatatgctaagcactggggaggattattgacacatggtttttgcctactgggacatgtaggtctactaaggaagactgatgtgtcttctattactgcaagatgtaaggtataggaaaggaatggtgactactacaacaatggaagggcaattttatatcaaagaaacctagtctagaaggattggaagagtattgttctatgtcaagatgttatgcaaaaattcttaaatctgagggtgaaaatattgatgagagagagcatttggatgagaacagaatcagaagaattagggtaggaaaatctgggcaatgtaataaagtttataaaactggtgtggcagtttgctctagtaatgatggtctttcagcaatctggatagtgtttagaagtgtcattctgctaggagctgaatgtctggcagttactttacaatcataaagaaaagggaaaataattttggcattctaaaatgttatgcattttgttgcagaaaaaaatagaaaataataatcaaaatgaagactaacattaagagataaccgctatagcacattggcttagatcctttcagacataagcatatgtgtgtgaggtcacgccataataatgtcttgaaattgccatttttcactcactgtcttgtgtatacctttccttatcaagaaataataatgtgtaaaatcattttcagtgactcaggaagtattgtattatatgtaggtaccatttatctgatgaggacggtgttatatttgtttccagtgtttccctattatagagaatgctgtggtaagctttttacaattaaatccttaataatttccttaaggcacatttttaaaaaagggccttaatgagtcaaagagcattggaatacatcattcgctgatctcattgggcgtggacagaaataaggaacgattgcttgtttggacttaattctgacaagtaataaaaaattgaaaatcatcggaatctttggagaacgactacatcatatttgagcaagtttgtatcttctaatttagggaagcagctttccagaaatttagataaaaggaaattagatgttctagcctgagtctttaaaggggaaaccaaaacatgaccacagggagcctaaggaatagtgcttaaccctgcctgggtctatgggggtaatgagaaggagggagagctaagacgactggcctagatgtatcagtttaaaccacttattgctatcagtaaataatgtacattccgtgcttattcagatggctcctatttactgttcaggcaaatcttgttacatggagtgatgtaatttaaggattatggtgtcagcagttttcattccctgccgccccccaccccaacattttgcatgtatttaaacatgttgcagaattgaacttcacaatactcattagtgtaccatccacctagattctactgttaacatgttactgtgcttatcacatatccattaatccattcttttttccacctaatattaatctattttgttttgatgcattttaaagtaaattggtagtttcatttttgaagttaaatctccttcagaaaggttctgcttttttcttttatatcagttggctttgatttccagatagtatttgttttgccttcacaaattatttctggctttacaactattagactactattctaattttgtttttatttccaagttcatacctgccatctgccattattttcagaaagtacattctagtttgccatgcctgcactcagattttatacaattggtaacttaaaaaaattatcatattttggtatgtatactaatgagggatatttgttataagtattaatctgagctaggttaaagcagaaaagggaaatttattctaagagtacaggggtgccaaagaacccaagggtaagaatggagcttggcctcaggatggaattagagccaagaaccagaaagccatcaggtttcttactagtatcacttcttgctactatttgctgcaggcttctctaagtggatcagctttttctgctcttctgtccaaatggtaaaatatggctgccccactccttcaggaattcagccaatagcacagaataattgaaccccttgtttccagtcctgggttacatgtttacattgctgcaatcagttattgcctggaaggaagtggtggtagtcataggacataggtagctgcccaggcagctaaatgagctgaaccaactctggttatcatgcatttaaagatgatacaaccagattatctgctcattgtttttgatgattccttctctataatcctgctccatgaattattctattgattttccttgagtcatcaatctttttctctttgttgatttttcctgctgcttaaaagcatgctcagataacgttttgaaattttccacacgtatcactcttttgaaaaggccttaacagccatgaataacctaattataaaacttttagcctcttaaccaattctggtacctggtagatgttcttatctcttcttagcttccatgttattgcactatcctgttgttttttttttttttttcccaccttcctgtctttctgaccatggttttgctgacttccttctcttcctaagcttaaaaatccctaagattaatttttagtcatttcttctgcattttcttccttaatcatttcatctacttgaactgtaatagcttttaccactgttgggggaactttaagttattatctctaactctcaactctcatttttacatttttaattattgggtatttctatctgagtatcttgctggtttctccaactcagcattcatgtgtaaggtcattattttagtctccaatctcagtcctccactgtttctcttcacttccgccattatttagatgcccaagtccaacaacacctgagtcatgagttcttgctgagctccatcccccatcccttatttggttcattgacaaatcagatggactccaagtcagatggactctattatcgactctcaagacactttgcttttctctcattgccaccagcctagatgaaatcttaattgtctcacttctagcctggtctccctttcttttgtttcccgcctttaaatgattcttcattctattaccagaccaatctttgttcagagaaagtgtcagtacttgctgcctgcttgtgctgtgctacattctaacattgcaaaaatgattgacagtcagtggagatatatagatatataaaagatatgatgtagctgtagtcattgtatgcagaagaaagagccataaattcttgaagaagataggaaaaggctttatagaagtgacttttagactggttgcctccagggagagaagggcattttagacaggggatatatacaggaagacataagaggacatggtgtgtataaggaattgtcataacttaatgtgtctgggaacagctgttaaagaaggtgaaaatgtagagtggtgctgtgtttaagaattgggatttcatccacattggagaatcaacaaagttttaaagtacacactgctagattttgacttttggtagaagcaatgaacatggaaaatactgttttgattctattgttctctattgattattgaagtaataacaatctcttatttggcattcaaggctttcagctgttctctatgacttcttgaatgtgctttatgcttcagccaattttatgctgcttattagatgggaaaatccttgtgctttcttcctctgtttgactattgaaattttaccatcttccaaagaagggaaagtttaaatgcctccacaatgaagggttctttcagctagagatgaacaccactgagctcttgtaataatttgtactccttgtgtggccatcattgagtatactgaaatctttgcttcctagttaggagtgttggagccagacagtcatggtttaaatcctagctgtatcatgtactgttcctgtgactggggacaagttactgaatctttctggaccatttttttcatgttttaaataggggtaatgacacctacatcacaggattaaagtgagaaggaaataaggtaatgattgtaaagcccttagctttatagtgttatgcaatactgtcattgttgcagtaaactacatagaaaggagtaataagaatagagtgctaaaatagtttctatattagaccgtttttgcattgctataaagaaatacccgagactggataatttataaagaggtttaattaattcacggttctgcaggctgttcagaaaacataactctggcatcagcttctgggaagacckcaggaagcttacaatcatggcagaagatgaagtgggagcaggcacttcacatagcaaaagcaggagcaagagttgaggttgggtgtgggagggggaagtgccacacatttctaaatgaccagatctcatgagaacccactgttgtaaagacagcaccaaaccttgagggatctgcccccatgacccaaacacttcccaccaggccctacctccagccccggggactgcaatttaacatgatatttgggcagggacaaatattcaaactatattggtttctgaagatggaagcacagcaagaagtaggaggtactcagtggcaataatgacattttaatagagaaaacaaatttccttttttttttttttttaaaaaaaagaggtggggttttgctttgttacccaggttggagtgtagtggtgtgatcatagctcactgtaaccttgaactcctgggctcaagaaccattgtcctgagtagctgggattataggtatgtgccaccatgcctggttattaaaaaatttggagcagagtcttgaggtattgctcaggctggtcttgaacacctggcctcaggtggttctcccacctcagtctcctgagtcgctgggattataggcacaagccactgtgcctggcgagaaaacaaatttctagtaaatgtcaccttatgcattaggaaggaaggtaagaacccaaaaagtgtagaacatcagcagtttctcgtactgtgttttaggctgattgtcagtatcacacacatgatgtttggtcattcttgtgctatttctggtttgaaactcttctccatgactcttagtagtcatggctcaccattgcttgcttctatgtgtgatatgtggccttggtggccacacattggaatttgaataaatatattcttgtgctaaaggaaagttatttgataaataattgttttaatttttatactttttaagacttttataaacatayatgaactaggcaaatttccatagcggatcaaacttcctaaaatttgcatcagaaaatatgatctctgtatagccctcatttctccttccagatagtcctttgtaagatttgggtatagatttatgccacctcctctgtcatgtaatcatatttccatttcctgttatctctttcccctgtctcccacatggtgagtgctgccactttgccctcttgctgcccattgttttcttgcggaattctactcagggccatcctctcctatagtgaagtgaatttaaagtttttcctttccgtttctctctctcaattccagtctcctgattttggtaaggtttgggtgagagcaacttaattgtaaacaatttacattaaagctttgtattcctttgtggctattcaacagatgaggcttctattcttaactttttctcatgtcttaaggtaatgcttacccacatgtggtctgtggatgaccctcatcagaattttctgagggtgctagaaattgtaatcatgggctgggtctagggtggcatccaaggactctgcttttaaagtaagtacccaaggtgatgtttatactcccagaaagtttgagaacctctgttgttgtgattgggtcctgcttttaatgctttcttctcttcccccaaactttatggggttcattttttccatgggtttgccggaagcaaagatagcaatcccaactacctgtcacttaaagtagaaggggtactgctgatttttttttttaatcattattttaagtaaaacaaaccaaaaaaaacccaactactgttttgttttgtttttttttctcacaattgcaagatttaagagtgaaaacagagcccatacaatgggaggagacccaaagggggttgccactcccggcaagaatgcttggggtttatatcccaatcattgtccctccccctatgctctcaggtgatatatgatttgactttttttttttttttacctcctgctttagcctaatttgtattttagtgagccctctttactatctgattggttgggtgtgagctgagttacaagccccgtgtttaaaggtgggtgcggtcaccttcccagctgggtttaggaattcttagtcggcttaggaaatccagctagtcttgtctctcagtctcggctctcaacaggaaaactcaagtgctgttggggaggttggccgacgaccgctcttaactgcttcctgctgaattgggggcatagtaggggtcatgcagttcagatttccttgggaggggtgccttcgatctcatcaacattggagcatgggctagtaggccggtctaggggtccgcagtagttcaaatgcatcaggggctccatttgaagaaccatttatacttctacaccttctattctggaagagacaaacttaacaaggaggttaaagatacagggattgaaacgtatggcctgcagtgcaggggattatttctttggcacacttcacaggccctgactatctgcttgatagtttttaaaaggcctggtccagtaaataatgatttagccatctgatgggtgctatcaatgcctaaatgaaaggtttggtgaagggttttaagtaatttccattggttagctgcaggcaaaagtatttttccttcttcagtggctagccatcctgaggggaggaaacttgtcctcatgagggtccccattctgtttctcctgccgagtactgcagcttggtttcccggaggggattaccccatactaggggtccttctgtaagcatttctaatggagggtcctgccttgcggctcttttggcttcaatatccgcttggcagttcacttctatttccctttcgtttcctttctgatgaccctggcagcataagactgccacctcttgaggtttctgtacagccagtagtaatctcctaaaggcttcctgatgtttgataggtgttccctcggaagttaggaattccctttctctccatattgctgcgtgggcatggaggactaggtaagcatgcctagagtctgtgtatatatttaccctttttccttctcctaattctagtgtataacggcccctccttttgctagaatgtctctccctaacaaaggagtggggctttcaagcataattagaaagccatgtgaaaagagtaaagttccccagtcacaacttagtggctgggagaagtatttagtgactgcctgtcttaggacccctcagataatgacagatctggaggacagttgtccgggacagggagagtaagactgagaaggccacaccagtgtccaggagacagttaacctcctggccctcaatggtcaagcatacccggggctctgtgagggtgacggcatgggctggcgcttaccccaggcaccctcagtcctgctgctggatcatctggttagtggcttctgactcagagatccttcatcccctggggcagtgggccttccagtgattcccttgacataaggggcatggacgagggggtagcttatttcttttcggacaatcttttttaaagtgtccttgtaggccgcactggaagcaagccctattaggcattcaacttgcccagcctttcggtgttccagagcctcaaagtccgcttacctgagggccatgactaaagcggtgacctttttcttaacttgtttgtccctttctgcctgctctttctgatctctattataaaaaaactgaggttgccaagttcagtagagtttctaagttttgctgcaggcctaaggcggacttttgaattttttctaatgtctgcaactgactgaataataaacttaccctttaagattagttggccttcaatagagtcagttgacagagagctatgcttcctcagtgcctcccttagtctctccagaaacgtggtaggattttctttctttccctgtgttatagtggacaacactgaataatttataggcttcttcctagttttccttagtccttctagcacgcaagttagtaaatgtctgcagcaccaatctccatgttctgattctgcatcccagtgagggtctacactgggaactgcctgctggcctgtggggaattgttctttcctctgttgtcatcctatcattgacctgactgagataccagagatcgccaaactctcaggttgcagttatggcagcacttttctcatttggggttagtgtctgatctagcagtaacattatatttttccatgtcagatcaaaggattgtcctaacccttgtaaaacatcaatatagccatcagggttatctgataatttacctaggtctattttaatttgtctctctctctctgtctgtctttcctctccttgacttactcaatttgcttttatcctgttctgttatgttgttgtagacccatagtactgggtcatcagttctagggccctggccaaggagccaaggcttggagattgtattgcagagggataagctgggtagaaatcgggggaggagagcatcttacacaatgggagagcagtcctcctagccatttacaaacttggggccctggcaagttggtgggaaacaggtcccacataacggtcgagagctgtgtggctaaattgggagggacacgagggacaagactcactgggttgatagcctagatgcctaaggacacagcatagagcttcattagatccctttggagatacaacttgctccaatacgtgggaaaggaaatgaaagtctgaaccattagtatctaggaggcagggatcagaggaagtagattcagaggtaaggagaattttggggctacactttcaagaaagtcatggtcaggacccaggaggtatgggtcagaaggaaaggtggggtgcacgcatgggtgactgttgagtagagacttctggctgtgccatgatgtcaaccggctaatgctgggagttcgggacgacagctttctgcctctagttggcccttggcttccccaggaaaattgaaagcgcaagctggttccaggcagatcaatgctcccaacccagaaggtttgggggttgttagaaagccttttcccagatagcctcacatctgagtcttaagtctggcagccacgctaatcgtttttttaactggccgacaagcaccctgtattttcctctgattctaaggaaggatagcaagcgaaagtagtccaatattactcaccgctttggagagtcccttcgtggttgccaaaatgttaccagggtgtccttgctcctagagctcccaagatgttggcggccacttccaagatggcagcaagcctcttgttctctgacctggggttcttggcctcacggattccaaggaatggaatcttgggccatgtggtgagtgttatagctctattagaagccatgggtcatggaasagaaccgtggaacccagcgactagtgttcagcttgattaggatgaacttgggcacttagctgtgcaggaacaatggcaagcctttagcccgatcgggagtggcaatgggtgcctcgctggatcaggagcacagtggacaccctgctggatytggaggggtggaagtcagcatcagcggcgggtctgcgatggcggcaaacaacagtggtggatggcaagtgaaagcacagctggagccataacaaacacagaccagaagagtatgcagttgcaagatttaatagagtgaaaacggagctcccatacaatgggagggaacccaaagggggttgcccaacaattacggtttacaacaagaatactgtgtacattaagccggtatggatttcagtcttggtatttttagggtcatgccaagggtattgttggtctgtccccaaaggacagcaggggaagggaacttaggcttggtttcaatgctaaaatggcatatagatttttggagacatttgtattttctttgtctgtgttcagttttgtagtttctacagaaatgcaaggctctaccagaaatggctttggtcacttatggattggtcagtataataagcttgtgatacaattccttttttaattactaacaagcatggagtgagcaatgaaagtgaattggcattttcccagttggtggtagagacagtctggggttggttgccaaaattgccatattgggtagattacaagtggacaatgaagggaaaaaccatgaaatttaaagtacagtccagggaacacaagagtccaagtgaaggatatatccttttctctttgtcctttgctatgacaacctcctgatgcagatttggattgttttcctcattacgtagaccaacacctgagggtaaagggtaggatggttgtttctttccaggctttcagaatggcaggtaccaagcttgtgtgagtggatatgtgggtacacacctgcccttaccacaaaatatttgtaacatacactactaaatgtatgaatgactaatagtgtgtatttccattttcaaatgtgtcattcaaacagtaacaagtttctaattggtagattatggtgtagtgtgtgagagaagtgtgggagtaaagaatggcaccccaagaacctgaagtgattagtgactgcccagagtattctgtcaatgtgaggtaaagctggtcttgccttatttgcccttcttgccccccgcccctttcctgtgcctctgtttagaatttttcccctttatacctgtatattactttttctttcactcatttattcatgataaatgtagtaggaattggacctttgggacgcagtttttgagccttgaattcaagttttaaaaggtttctttcttttcttttttttgagacaggacctcactctgtcacccaggctggagtgcagtggcaatcatggctcactgcaaccttgaactcttgagctcaagggatccttctgccttggccttgtagtagctgggattacaggcttgcaccaccacacctggcttttattttattttatttttgagaattaggggtcccgctgtattgctcaggcttattttgaacttcaaggctcaagttatcctcccaccttggcctcccaaagtggtgggattacaggtcattgtgcttggccttaaaaagttttttagagtgctagtttcttgtggactataaaaagttgactgtaggtagttaaatgtatatttggtttaccatatagttgaagctgtttaattcataatggaattctatcattcaaaaaaatttgtagctattgctaagaagcccartagattttataataaaccatcatgaaagttctgtgtatatatggaagaaagaattattttctcagaacagagagaaactgcactgagattcaaaggctgagcagcgtatttgcctcaggttcagagagttgtggtaacatacatttttaatgtatggtatttgtgtgaggcctctaattttcctccatctctgattactaatttcatctgcctatcccatgggtgcctatgaaggttcgtgtgtgtgtgtgtgtgtgtgtgtgtgtgtgtgtgtgtataatgtatataatatacatatatgatgaatgcattataaataatatatctggatatattatatataatattttgtgttttgtgaaatatgcagtgttatttagtgtgtatatttttaattcccttaaatgctgttttactatggattttattgtttctcctttgtgtttaccactgttttaaacatttcatcgtgtttctatatgcatatctattcaacttactgcttttgattgctgcattaatatttcatggaatgcattttccacattacttacctgcttctctagtgatgcctccagctactcttacaaacaatgctccagggaatatatcaaatgtgttcccttatggaattgtatacgaatttcctatgcaatayatacccaggagttgtatagttgggtcatagaattggcattacctatgaaagcttactacatgattgctctgtggagtggcttaccagtatgcatgtggattccttttcttcatgttcttgttaacaactttctgtgttctcaaatctcatatttaagccactttgcattatcacactgctaagaattatcacattgattaataacttattatatcacagggtcacatttttattctggcaactagagctgagaaacttacaatggggatattgagggaagattgaaattcttgttgaagtttaaagtgttgcatgataatgttcaagaaggctcactgtctagaggacacagattataccttgttgacccatctagaaacatgatcttatcagagtcctcaagttgattacatttagatagtctgactgccctcaccagttaccaaagttaattaacaagccaataaactaattcatgatgaaaagtaaaactgtagatccttttggccatttcagttgtccttttttttttctctctaggaaatcacaatattatcagatgaaggtagctttgtgagttttatatcagggcaagaggaaatattgatctgaagagtgaagcatcttttattagaattttgattattggaattttatcagaaaaacttttataaaagttattagatagctgaacttttacagttgttaacccagaatgaaagtagccaaaatcattttttccttttccttattttctagtgaaaaatattatgactattatgattagaaatagcaatgtagaaaccatgcatatatatcaggatgtttgcagtttattactagtagaggaatagtagtgtgacaaccagtctgtaaacagagacttcaaagtgaaaatttcccattttaagaataaagaaactctttatggtttttataatagtaaggctaaatctaaatatttcacctaaagattgtataataacagccctgaaaaatgcaaaatgctgaatatgtacatcatgtacatatcatgggagaatactgccaccttgtgcatataggatgctattttatgcctccattttcttttgttacaccagctaatacttgctttttcagtttggtactgtggttagatgtgtaaatgtgtaaaacatttatttttttatgcagtaaaatcaagccaactattctttcggcaggaggagggtttttttttgttttgttttgtttttttgagacggagtcttgttctgtcacccagcctggagtgcagtggtgtgatctcggctcactgccacctccgcctcccaggttcaagcgattctcctgcctcagcctcctgagcacctgggactacaggcatgcgccactacacccagctaatttttttttttaatttgtagtagagatggggtttcactatattagccaggatggtcttgatctcctgaccttgtgatctgcccaccttggcctcccaaagtgctaggattacaggtgtgagccactgtgcctggcccggtcttgttttttgaaagatgttaaatttggtatagttagctctaagaattggaatgtctgagatcatactggttaattgacctctggggttagttgagaattggattcttttatttgaatcttatggaaagttgatgattctttaatcattcttcattttagtgcttgcagtactttggggttattctgaatggcagaattcattacactatcggaagtatagggaatttggcttctgacacaaacatatcccttgatttttaaatgttttccttcagctgaagtgcagaagaattactacaacacagggtgagcatccttaatttgaaaatctaaaatccacaatgttccaacattggaaactttttgaacactgtcatgagatagtgattcctttgcttcctgatagttcagtgtatgcaaactctgtttcatgcacaaaaccattaaaaatattgtataaaattaccttcaggctatgtgataagatgtatatgaaacataaataaattttatgtttagacttgggtcccatccccaagaaatctcattgtgtatatgtaaatattccagaatctgaaaaatatctgaaatctgaaacacttctggtcccaagcattttggataaaggatactcaatctatagtaacatgtaatagtttcttgaaacagtattgatgtaaatcaaaaaatgagttctttcaaatattctggttatctgacagcctgacttagatgggtttcagatattattgcctctctgaagaggaagaattatgagactggaagtcagcctttggatactcacaactaacttagctgcgtgaccagggatgcttctctgggcagtttctttatctgaaaaatgagcaattgaactggatgggttctgaggatctttttagttttcaaattctgtgactatataaagttttactctaattttaaaatgttatgctgtaataccgttcaaaatacttctatgtataagaagttattaaaaaatttaatcatatagttatatttaactatcagagtatatactagtaatttggtggggatggggttagaatatgtgtacataaaagtttaaaactagaagcctgggaaatttacctgttttttatttaacacctggggtacttgaagatatcagaagattggtttgggggtaatctagattttaattgtatatgatttatgcataatcctgttttgggtataaatgcattccaaatgcctacattcaacttctgagaagactccaaaagttgatataaatatggtaaagtccatttcataagcccaattttatgactgggatgaaaagagagaaaaaggtacctacagttgaaaatttggaagttctttagaatattacccaacttgaaaatttaaggccaaagactcttcaggatgtaaatcccttcattttatagtgtataacagcagatctttcctgctatcttgattcatttcctcatgaagtgctaagaatgaacccatgtgaccaagtttagctttttactttggggccatctggggataagtttttaaattctagggataattttaaggaaaatgattttcgttgttaagctacataaacatgccagattcaacctctgtactgaaatgatttccttgtgccttgccttgagatttttgcatttattttgtgtaataccaaattactattttgtagagaacagaattataataaatgttggaattcactaataaaatgcaatcacataaaatctatgcatattataagccattaaagatgttaatgtattaaaatatacatttatccttctgattattgaaatataagaaaatactaagtaaattatacttcataaaagtgaagataatttaatcatgaaaaaaagcaaagtggaaaatatcctaatctgtttttagaatgtgaaaatcttatggttcaatcccaagttttggcaccaaaaaaaaaaaaagtaaaatcttaagaaaatgtgtgtgtcactggtaacattagtcgtgatgtttcttcatagagatttttccaaaagctccgttccaaaatctctctctgcaatgaggtaggaatgttatgggattagaaaaaatatttggtgttagtttataactaatctacaaatccagtctctggattgatactcttcagatattttgaagtttttgtagagggactgtagcttttattaatagcaaatcatagttgtaaacagagcattcctagtttctttgtcttaattttatgtatagatggagatttcagctcataattaattacctgtatctggcttagttgtattatgttcatgttcatttgtttgaaaagcctttgaactagaacaagaattatgattgtaataaaaaaacttgcttgtcagttgttattttcttctttcttgagaattacagagaataagagaacactttctaatgcgtgcatctttattttgaaattttaatgcagcaaataactttcaagatagaaaagggtttttgttaagttatttgcaccataaactgcatagttgaatttgtagtaagaagactcaccaccaatttatttcagtagccaagatcaaactagggtactatgccaaaacatgtaataaaaagtgatgcaatacttcagcatgattgctttttatgttttgtacaggtccagacctatctattcttacatgatgtgcaaaattgaatgattcaaccattgattttgataaataaggatttttacaactatgaaatattggtgttttgcaaattaaaaatagcatgttatgaaatattggtattttggaaattaaaaatagcatgttattttgaaatattgaaagtgagtatggccattaactgttacaatatgtaggtcaaggtagagattggtagctatatggaatttgaagaatttagaatgtaaacccagcactgagatttttaatctactttattgtgtctactactagtcagtctacttggtaaattggtctttttttaaaaatcgtagcagaaggttaataattatgagttttttctcatgtgtaaaactttgtttccttagttttaattgcaaagctttttaggtcattctacagtgtaaacccaataacatgtacaaaatgagacatttatattttaagcatatcttcttcctttttgcaactttttatttcttcctttgaatgcattaaatttattggttgtagccctctgtgaagcaggtgctgctcatcagagtgattctayattcagaaatattagtatatggacattttaatgtgtgctaattttatttaaccttatacaatatttgtgggcataaggtattttagatgattgtgagttaataatcaatgatatactgtacagttttaagatgtttagcattgrtctcacttatatatattttcttctcmctaggcaagaagttatgaaatggaatggatggggatataatgattctaaattcatcttcaataagaagggccaaattgaattgactgggaaaaggtaaccctggtttatttcttcttttgttcctcctttaattctttctttctatgaaaaattttaaacacacatgaaaatataatgattcctccttragtttaaacattatcaacattttgccataactgctttttgtctcctggtaatatttcaaattctgatgttgtcatgtcacctctaaatatatgtatttgtgtgtgtgtatatatatattatatgtcttaaaaaataaggacctaatataaccaattatataatattatatatccaaaatagcaaaaaatttttatttagttatccagttcatattcacattctccagttgtctcacaaacatcttttataggtagtttatttgtgtcaggatccaaataatgtctataagccacccaccacccaattcccatgccattcagttttttgaaagtagcttcatatttaaatctggtaatttacaaggagtgtgggttattatgaaaggtgaatgattttaggtctgtgtgaatataaatagtattttaaaaaattagcttctgagataaattaggaaagaagtgatagggaaagatcagtcatttttgtgatagcttttctatgtcttaaatgtggttatttgttgataagaattacaaagcatattkgttcaatcatacctcagtaaaactggaaaaatattaaaaagaattctaaaggatatttgtgttattcctgtttgttctagatayggtcagaattgtaaaacgagttctttgttggttttaagcaatactgcctttgccaaagctctgtttttggtttgtctgttgaattttgatacatttgaaagggcagtgagtacaaatatgtaatacttaaatgctggaaccaaaaataaaaagaaactgagactaagtaaaaaattggatcagatatattatgagtctattccagtattgtaccctgatttaatatctattggacattactatacttaagttaatgtttttaaaacatgtgctatatcagtatattaaaatatcagcaaagtaagtttcattcctttggagaagttatttatttccttttcattgcaatgtattaataatttttctatttttctgacattaatattttgtacctaaaataaaacctcaggaatagtaatttgaaagtaattttaatgaagttctgaagatgtacatttgactttttttttaattaggaaaataaatattatctgtgttctcattcccatccttaattgtgactgggtagcaagcaatggaggcttagttgagaaattgtgtaattcaggtagaagggatttctggttaatatcagatttaccagtgttctaaatgtggaatcttttatgttttatttaaatagaataatgtctaatacagtagaaacatcgatgtagagatcggcttttcaaaatcttctgaaggagtaaaaattaatcttctgaacttagaaaaccaaatttctctcttctcggacactgtcctcatttctccttctctttttctctgtgtttggaccttgaaggtatacagtatttctgttttatggaacagggtagatagtcacttgtatttcagcaaagtcttctgtacagtactgtaggccatgtaatggtttatatgagaaggtgtgtgtgtatgtgtgtgtgtgtgaaatgaatgactagtcataaaacatcacaggtaattataccttagtgggtcccatgttttcaggatctcgttcttattttgggtgttctggcacttgatttgtcagtttcctggaagagatgaggctgtaggggtctgacacacatgccacacttctaagaaactgatttaaaaaattagaacctcagtgtattcatttatggttagattattgctttttcagggtatggaatacttgttagtgccctttctgatgttagggtatctagagaacaacatttgcaacttagatattctttggagagcatacattcagaacaaaggagatttgatggtcttgatagagatttttatacaggctgtaatagaaccagagaatttatctgttggttttaatgggttactaccactcctaccagaatgcattccttaaaggcctcatttctttgcattgttgactcctaagtcagagtccagtgggggagagggagaataagggttcatctgactggaagagcctgcaagggagaccaggaaagtgaatatctggcaaatttgcattagtggagggtagcttttgccttccttcaagacttacaaaaaggataattccccaaacgtataaatgggatttaggtgctctgagattaaatatatactaaacaaacaataactaaaatgaaataacaaaacaaaattcaattcccattttggtgggaagcaccagtaccttgtcacaggataataaactgggttgaattgaatcataactttctctatatctagtctgttttcctaagaataattggtgaatgagtaggtttctctgatttttatcagaaaacatttacaaacactcttaagataataatatctactatttattgagtatcagccaaacagtggctgaacagtattaattcactcttatttattaataatattagatggtaaggacaatttttgaaattttttgtagagactttctattctggcagtgaggtagacagaaataattcaggcccctcgccttctataaccatacagaaaagttggataaaatattagaagaaagaaatataacagagctggaaagaaagaaagggaaatcccaggtgccagaaactaatgtgattatcagtgaaaattgatgaggtgtggggttttcctatttctgatccaaagaacattgaaaaggtagatttttatacggaaatgtagttgattgtctatattttgcaggagggcgactttgacatttcaagcccaggcattacattgtaagcaattattagaagctattatagaataacagcttttcccctatgttaggagaagagtctgaaatttttttctgagcagtctatcttctgaacagatttataatttatcagtttataaatctctagatttatcacttaccactcttattccttctaagtatgagtgaatttagtcctcctgggtttaagcagcataaggcaatactctggagccaattctagagattttttttttccttcagcttttaagttctggggtacatgtgcaggatgtgcaggtttgttacatagctaaacgtgtgacatggtggtttgctgcacagatcaacccatccccttggttattaggttattaagcccactatccattagctgtttttcctgatgctctccctccttctactgctccccttgatgggccccagtgtatgttgttcccctccttgtgttcatgtgttctcattgttcagctccracttataagtgagaacatgcggtgtttggttttctgttcctgtgttagtttgctgaggataatggcttccagctctatccatgtccctgcaaaggacatgattgtgttcctttctatggctgcatagtattccatggtgtatatgtaccatattttctttatccagtcaatcattgatggacatttgggttgattccatgtgtttgctattgtgaattgtgctgcaatgaacatatgcatgcatatatctttataatagaatgattttttttttgcctgtacaactatttaatgtctgtatgcctctgaatagtaattaggagaaaacatatggaaatgaaaattatttcaaattttaaaatcttgaaacagaaagcaatatttataatgtatctattcctttgtgtatttacccagtaaggggactgctgggtcaaattgtatttctgcctctagatctttgaggaatcaccacactgtcttccacaatggttgaactaatttacagtccaccagtgtaaaagcattcctttatctctgcaacctcactggcatctgttgtttctggactttttaataatcgccattctgacgtgaggtggtatctcattgtggttttgatgtgcgtttctctaatgatgagtgatgctgagctttttttcatgtttgttggctgcatgaatgtcttcttttgagaagtgtctgttcatgtcctttgcccactttttaatggggttggttttttcttgtaaatttgtttaagttccttgtagactctggatattagacctttgtcagatgctccgattgcaaaaattttctcccgttctgtaggttgtctgttcactctgatgatagtttcttttgctgtgcagaagctctttagtttaattagatctcatttgtcaattttggcttttgctgcaattgcttttggcgtttttgtcgtgaaatctttgcccatgcctatgttctgaatggtattgcctagatttttttctggggtttttatagttttgggttttacatttaagtctttaatccatcttgagttaatttttgtgtaagatgtaaggaagggatatagtttcaattttctgcatatgcctacccagttctcccagcaccatttattaaatagggaatcctggccgggcgcagtggctcacacccgtaatcccagcactttgggaggctgaggcgggtggatcacctgaggtcaggagtttgagaccagcctgaccaacatggagaaaccctgtctctactaaaaatacaaaagttagcagagcatggtggcgcatgcctataatcccagctactcgtgaggctgaggcaggagactcgcttgaacccgggaggtggaggttgcggtgagccaagatcacgccattgcactccagcctgggcaacaagagtgaaactctgcctagaaaaaaaaaaaaaaaaaaaaaaaggaaatcctttccccattgcttgtttttgtcaggtttgttgaagatcagatggttgtaggtgtgcagtcttatttctgggatctctattcttttccattggtctatgtgtctgtttttgtgccagtaccatgatgttttggttactgtaggcttgtagtatagttggaacttgggtagtgtgatgcctccagctttgttctttttgtgtaggattgtcttggctatacaggctcttttttgattccatatgaattttaaaatagttttttctagttctgtgaagaatgtcaatgatagtttaatgggaatagcattgaatctataaattactttgggtagtatggccattttcacaatattgattcttcctatccatgagcatagaatgtttttccatttctttgtgtcttctctgagttccgtgagcagtgatttgtagttgtccttgaagaggtccttcatttcccttgttagatgtattcataggtgttttattctctttgtagcaattgtgaatgggagttcattcatgatttggctctcttcttgcctgttgttggtgtataggaatactagtgatttttgcacattgattttgtatcctgagactttgctgaagttgcttatcagcttcagaagcttttgggctgagatgatggggttttctagatacaggatcatgtcatctgcaaacagaaacagtttgacttcctctcttcctatttgaattttctttatttctttctcttgcctggttgccctggccagaacttccaatactatgttgaaagtagtggtgagagaaagcatccttgtcttatgccggttttcgaggagaatgcttccagcttttgctcattctggtataatattgactatgagtttgttatatatggctcttattattttgaagtatggtccttcaatccttactttattgaatttttaacatgaagagatgctgaattttatctaaggccttttctgtgtccattgagataatcatgtggtttttgtctttagttctgtttatgtgataaattacatttattgatttgcatatgttgaaccaaccttgattgtggtggataagctttttgatgtattgctgggttcagtttgccagtattttatttaggatttttgcattgatgttcatcagggatattggcttgaagttttctttttttgttgttgtgtctctgccaggttttggtatcaaaatgatgctgatctcataaaaggagttaggtagcagtccctccttttcaatttagtttcagtagaaatggtaccagctcttctttgtacctctagtagaattcagctgtaaatctgtctggtcctgggctctttttggttggcaggctattactgtctcattttcagaactcattactggtctattcagggattcaggttcttcctggttcaatcttgggagggtgtatatgtccaggaacttatccacttttttctagattttctagttcatgtgcgtagagatgttgatagtattctttgatgattgtttgtatttctgtagtgtcagtggtggtatcccccttatcatttttgatggtgtctgattcttctctcttttcttctttattagtctagctagcagtctgcctatttattttttcaaaaaaccagctcctggattcattggctttttgaagggtttttcacatctctatcttctttagttctgctctgatcttggttatttcttgtgttctgctacctttggagtttgttcttggttctctagttcttttagttgtcatgttaggttgttaatttgagatctttctaggtttttgatgtgggcattttagtgctagaaattttcctcttaacactgctttagctgcaccccagagattctggtactttgtttctttgttttcattagtttcaaataacttcttgatttctgccttaatttcacccaggagtcattcaggttgttcagtttccatgtagttgtatggttttgggtgatttttttagtcttgattctaacctgattgtgttgtggtctgagagactgttatgatttcagttattttgcatttgctggggggtgttttaattccgattacgtgatcaattttagagtaagtgttgtggcgatgagaaaaatatatattttgttgtttttgggtggagggttctgtagatgtctatcaagtctgcttgatccaaagctgagttcaggttttgaatatcttttaattttctgtctcagtgatctgtctaatattgtcagtgggatgttaaagcctctcactattattgtgtgtgagtgtaagtctctttgtaggtctctaataatttgctttatggatctgggtgctcctctattgggtacatatatatttaggatatttagctcttcttgttgaattgaaccctttaccattatgtaatgctcttctttgtcttttttggtctttgttggtttaaagtctgttttgtcagaaactaggattgcgacacctgcttttttctgttttgcatttgcttggtaaattttcctccatccctttcttttgagttcatgtgtgtctttgcattttacatgggtctcttgacagcatgctaatgggtcttgactcttcacccaccttgcaattctgtgtcttttaattcgggcatttagcccatttacatttaaggtttttattatgtgtgaatttgatcctgtcatcatgatgctaggtagttattttgcatacttgtttatgtggttgcttcatagtgtcactggtctgtgtacttcagtgtgtttttatagtggctggtaaccatttttctttttcatatttagtgctttcttcaggagctcttgcaaggcaggcctggtggtgatgaattccctcagcatttgcttgtctggaaaggatcttcttcttcgcttatgaagcttagtttggctggatatgaaattctaggttgaaaattcttttctttaagaatgttgaatattggcccccaatctcttctggcctgtagggtttttgctgagaggtctgctgttagtctgatgggtttccctttgtaggtgacctggcctttctctctggctacccataacattttttctctcttttcaacctttgagaatctgatgattatgtgtcttggggttgatctcatggagtatcttactggggttctctggacttcctgcatttgaatgttggcctgtcttgctaggttggggaagttctcctggattatattctgaagtatgttttccaacttggttccattctctccatctctttcgggtaccccaatcagtcataggttcagtcttttttacatagtcccacatttctcagaggttttgttcatttcttttcattcttttttctctattcttgtctgccttgaagactatagtcttcaagctttgagattctttcctccacttggtctattctgctattgatacttgtgattgcattgtgaatttcttgtgttgtgtttttcagctgcatcagattagttatgctcctctctaaactggctcttctggttttcagctcctgtattgttttatcatgattcttagcttttttgcattgggttagagcatgttcctttagctcagcgaagttcgttattacccaccatctgaagcctacttctgtgatttcaaccatctcagccttagcccagttctctgcccttgctggagaggtattgtggtcatttggaggagaagaggccctctggctttttgagttttcagtatttttgcattgattctttctcatctttgtgggattatctagcttcaattttttgaggttgctgacctttgagtgggatttttgtgtggtcttttttttgatgctgttgttgttgctttctgtttgtttgtttttcttttaacaggccactttttcgtagggctgctgtggtttgtttggggattgctcgtgaccctatttgcctcatttttcccagacctggaggtatcaccagtggaggctgtgaaacagcaaagatggcagcctgctttttcctctgggagctccgtcccagggtgggtagtgacctgttgctggcctggatgctcccatagggtgtctggagacccctgttgggagctctgacacagtcaggaggaacaggatggctgggttttggtggagcagctgtgccatgttggggataaccctttcatgtccagactgcctggactcttcagagccagcaggctggaaaggctgagtcaactgaactgcagagacatcggctgtgtctcccccaaggggctctgtcccagggagagatcagagttctgtctgtgtcaccctgtctggagttgctgaaattcccacagggagtccccacccaatgaggagcaatggattggggtcccacttaaaaaaaagcagtctggccacaatctggcatagcagctgtgttgcattgtgtgggattccttctcattcagaccacctggactgcctggagctggcaggctagaacagctgagtcaacctaaccacagaaatggtggttgctcctccttcagggaactcatccatctcaggcagtctccagattgttgcactggctggctggaattccaagccagtgggtcttaacttgtgaggtgctgtggaagtgtggcctgcagaacaatgttgcttggatccctggattcagtccccctcctaggggagtgagcagatggatcttccaccttgctgggattcctagggtggagtctgtaaaactcctgggttactgtgcgagcctgagtgactgttcttttgagacacrgctctgtgtattgaacccaaggccctggtggtgtggggtcatgaggggatctcctgatccacaggttacaaatatggagtgggagaagtgtggtttccctggtggggttgcacaatctctcactgctctgcttggctgggggtgggggttcttttggctccatgcttctcccacttggatcatcaccccaccctccttttctttgttctccatgggtccagctgtctgcctagtcagtcctgatgtgagaacgtggatattttagttgaaggtgctgaattcagttgctattttcattcttctccatgacagctgcggatcacagctgcttctaatcagccatctcagtccctatagatttctataaactaaaatttttgaaaaatgtcattatttttgactttatgggtattatacattagtttggtacttagaaatcacaagttagtatataaatgaaaaatttgagtttgttagactttgtctttttgatggcataatttttaattgaagctttatctgattataaaaaggctgttaaattgcttagcaattgtggaactcaccctgaggctagatgattgtatatacttatcaggggaacccacccccagtatttcaacataggttctattttccctaagtgtcggctggtctgagaaataaacagaaagagtacaaagagaggaattttacagctgggccgccgggggtgataccacattatcggtaggtccataatgccccctgagctacaaaaccagcaagtttttattagggatttcaaaaggggagggggtgtacaaacagggagtaggtcacaaagatcacatgcttcaaagggcaataaagatcacaaggcaaagggcaaagtaaagatcacaaggcaaagggcaaaattagaatgactgatgagggtctgtgttcggctgtgcacgtattgtcttgataaacatcttaaacaacagaaaacagggttcgagagcagagaaccggtctgacctcaaatttaccagagcgggatcttttccccaccctaataagccagagggtaatgcaggagaacagggcgtaatttcagtccttatctcaactgcatgagacagacacttccagagcagctgtttatagacgtccccccaggaatgcattccctccccagggtattaattattaatattccttgctgggaaaataattcagcgatatctctcctgctttcacgtccttttataggctctctgcaagaagaaaaatatggctctattgtgcctgaccccgcaggcagtcagacctttggttgtgttcccttgttccttaaaattgctgttattctgttcgttttcaaggtgctctgatttcatattgttcaaacacacatgttttacagtcaatttgtacaatagtggtcctgaggtgacctacattctcagcttatgaaggtaacaggattaagagattaaaggcaggcataagaaattataagagtattaattttgggaactgataaatgaccatgaaatcttcacaatttgtgttcctctgccatggctccagccggtccctctgttcggggtccctgacttcccgcaacatatactaatatttttgctgcttcttatgtgctgccccagagtgagagtcactttgcttttagtcattgtcagtcctgatgtgcacttccctcttggataatttttgtccacagaattttttctttccatgtagaatgatttcattggccttgaaaacttgttctggttctgtatcttctataatatagtctatttcagccctatgggaaagtgataaattgatctcaccttatattttacaacaaaagccatttaatattctcaaactaatcttcagtcatggaaaagaagaagatccattcagtagtcactgkgattcaacaattggtataagtgcttaactttccctttatcacatctctggttaaagtttcatgttctctgcccatgtgttcatctcacaaattaaatgttgctgtagctttgactaagctaggttgcaagtttcttaaaaacaggagtcataataccaattccatgtattctgcaatgctaagtacagtcttctgagtgttaaataaatattgtgcattcagatatagagatataaagactttattttagtgatagaaggtagttttaaattttatacatgatagtaacactaactctgtatctgtagtttcaagtatcttgaaggtggtcacctttttattttatgggaatacctgagactgggtaattaataaagaatagaggtttatttggctcatggttctgtaggctgtgcaagaaacatggcatcagggtctgcttctggtgaggacctcaagctgcttccagtcctgcagaaggggaaggggagctggtatgtgctgagatcacatggtgaaactgaaagcaagagagagatggtagggaggtgccaggctctttttaaacaaccagctcttgagggaactaacaactcactcacacttctctcccttcccccagggcattaatctattcataaagatatacgtccatgacccaaccacctcccactaggggatcaaatttcaacatgaggtctggagggtttggtgtccaaactacaggactcctttaagagagtgaaaggataaatcacagagtaagagaaaatgtctaatatgtgtatctttcattttataaatatataaagatttcttacatgtaattgagaaaacaataacccaggaggaaaatgagcaaaagacttgaactggctttcaaaatggaggatatccaaatggacaatagttataggaatagatgctcaatttcataagtactcagtaaaattcaaattaaaattgtaatgagatgccaatggaatgtctcagattcaattatagaatttctrttgtgttcttttttatagttttttatttctctgctaagattttttttctaatattcaccaggagtacattttccattttgtccattggcgtagcaacaatagctgctttaaaacccttgtgtgctacttccagtatcttgggtcattttggggtcagtcatcattaattgtcctttttcttgaatatgagtcatactttccagtttgttcttgtctagtaatattggagtgtgttttggacattgtacatgatatgatgtaggagctgtggattctgttatattcctctgaagagacctttaaaagactttttttttcttaaatcaagcaattaacttgactgatctgaaactctaaattctgtctccctgtggtgagcagctgaattgcctgtccagtttttttttaagcttaactgggctgcctagaagattccagtatgtattctatacatgctattcagagtcagccagacatttggagagagctgatagattggttcctctcttacttgcttctttctgtgatttctcggtatgctttccagatgcagcattcaccccaaacactgtgctctggttccttaagccaggaagactgtaaattttcagcatttttattaccttttgaggcaccagctggggcctgccataaggctaaaacttatggaaaaaacaaaaccaaactggaaacttatgaacttatgtagtattttttccttttttcaagtgtagcacacccttctcccctatttttgactgcttttggtctgtctatactgcctttagatagctgggttttgtttgttttgttttcgttcagagtttatagttacatgtgaaagtgttggtttgatagtagctgcttgaccatcactggaagcagaatttaagctttaaatttaaatgaagatactttgctctaatatttttactttctttgtaccttaggtaccctcttagtggcatgggtttaccaacatttaaagaatggatccaaaatacccttggagtaaatgtggagcataaaactacctctaaagtaagcaaacaaaaattattactaactcatttaactgtgtttttaaaacccaaattaatttgatttatctttgtaaktcattatattggatttactgcaactgtcatgttttttgttataaagcctattaattatattggccttgttagactgttagcggcagttattcattgtcacagatatagaccttagtctcagaatttatttgagatttatctggcaaactttttatcctctctgagccttggttatttttagaattgggagtaataactatttgttctgcctatcacagggtagtagtgaagtgcagattatttacttccttaaagagtgctttgttacagaaatataagttgctatcatgtttagattatttaatagactgactgtaatctaggattaatagagaataatttaaaataaaaatgtaaaatcacatttagtattaggatatttagaatatttgaagaattataaaaagtaaaaatttgattaagatatgagtgattgaggattttagtttgttcatgtagtttcacttttctgaaagtgggattaggaaactttaaactgtaggggtatatatatatatatatatatatatawatatgtatgaaactaatgaaatatttagcgtttctttttattatttttgttgtgtttttattattgttgcatttctttttattatttttgatgtgtttttattattattttgctgtagcatagtattctgtatgtctctctaactggatataagttccataagtacagggctatgtcttatacaatattctccactgtatccaacttgttgttaagtggtataggtatttggtgagtacttgttgggtttatttaaaaatccacagttattttactctagttattaagttaggctgaacaactaattctaccccttccaagccatcttttaacttttcctagacgtctcttatctcttaaattctctctctcttttgatctcttgactatttgcaattacttgtttttgacattgatacaatccacatactatagttagaaatttcaccaggttttgagcccttttcaattcttaatgacttaaaatattaatatattttgttggagttcttttagtatttccttctcctatgggataaattgcacagggtcaaaatttttttttctgtttaactcactgttgtatcaagaccttgaagagtggctagcttatagcagccactcagtaagtatttattatgcagtatcttaataagagattaagataatatgcaagtatcatatttgttctttgcatattcttatatactttcttttttccaaatactgtatgatagcttccctcaatcccccgtagcagattttacttggccagccgtttatagacttcttcctatattctagccatgctattaggtgcttttcacaaaaattatcacatttaacctgccttccttatagtagcactatggtgacaatgtcatttaacagatgaagaagccaaggctcacagaagttgggtgacatgcccaatgtctcatagttttaactttgaagttgaagattagatttcaagttacctgttaggtgaaattgaatatcaagtttataattatgttgtgagttttaaagcagctctataaaaatggatttattacttattttgaggctttctgttgatcactttaaaatggcaattgaagaataagaaatgctgaattttttttttttttttttttttttttttgcgacagagtctcgctctgtctcccagagctctgtcgctctggagtgccgtggtacaatctcggctcactgcaagctctgcctcccgggttcatgccattctcctgcctcagcctcccaagtagctgggactacaggcgcccgccaccacgcccggctaatttttgtatttttagtagaggcgaggtttcaccatgttagccaggatggtctcaatctcctgacctcgtgatctgcccttcttggcctccgaaagtgctgggattacaggcgtgagccaccgcacccggccagaaatgctaaattttatcgacaggtataagtgtagatagtgcgaaagtcaagtagctttctcccagtctccttaatctgaaatggaagatttaatactttgctgtcttccctgttgattacaatctttagaaatttgtaatttgttactctcataaagctgatttctatatatgttgtgttgtattttcctatgcttcagccttactttgaatgtttaaaaaaaagtctacattttatagtcattctctytaactgaagtacccaaaattcgttgtctaaaaataagtcaaagaaatcaattttattttctaggcatccttaaatcctagtgatacacctccttctgttgtaaatgaagattttcttcatgaccttaaagaaactaatatttcatattcacaagaggcagatgatcgagtatttagagctcatggtaagttactttatattagccctatttatttttaacaaaaaaattctatattttaagctgtttttgtgtttttcttttttttaaccacaaaacaggtcattgtcttcatgagatatttttgctcagggaaggaatgtttgagcgaattcctgatatagttttatggccaagtaagttttcccctcctcgtatcattaatttagtattgctaaattttaggtaaatttaacattggaaatacgtactttttggcatatgagttgtaaaaaatataaattgctgtatttttaagagagtttacataacagtcttgaagctctttcttgacttggttgttctgaactattggttttaacaattcattttgttgctgataattaaatcatcattttaaatgtaaataatcatatttgagatgtcagtggaaaaacatatttttggatartttggaagcttcatgaaattagtgtcagtaatacattcagatatatagaattattaatataattgagtactgcaaactaatattagtaataatttgttgatatcagcttgtgagctttaaaaagcctggtcaaacaagttttatgtattatgtttatgcatgctatgtttaaaatgaataattaaattttgagtaattattaggatttggctgggacaggggatggatgagctttctgttgtaattttgctcttagtgagtagtaggtactatatttataaatctgaagtttttacctatctcttttagcaggtaatttaaagcaagatgggtatattgttccttgctgtccatyattgcattttttaaagagttctattgatcttctgattcattttctcttcagatcttccttttcagagtgtatattttattttttaataaattggctcattcacggactctcagttcttaaatgagatccttctactttggagggactgagagaaaaattatactttaatgtgggggcaagaggcargtgagatacacagaaggaaaatccaagagcatatgtagcagagatgaagttactttcctgatacttgtatattagtctatgcatttggaatatttatgaaatgtctttcatctctattagtttagtatagaaattttaactgttcctgaggaaaagatattctccaatagaagaaatatttttgttttgcttccttgctttttagtagctttaggttacttctctaccaagatttggagaaggtttattccatttattactggaaaacatgaaagcaaaatttatcaattttcacttcccacaagaaacctaataggccatcctttgatgtatcttaataagaacttccaagtgtaccttctaggcattttcttcatgtctttcaatattaaaatacttagagagttgggcttggcagtgcatgcctgtagtccccgttactcagaatgatgacgcaggaggattacttgcctgaagttcgagtctagcctggactagtgagtccctcatgtcttaaaaaacaaaaacaaaaacaaaaacagaataatatagtggaagtatattttgctttaagaaatccaaatattctcaaaaactcagatgtagtaaacaatatttcacaaaagtttctttgctttgtaaaatccctcccattttattggttcccttgcacctttgctcttccactttttttcatcccagtttccaaatcagttccttctcagtgtatatccaggtttttgtgaagccataagggttttcatgccgcatgtttcttgccccttaagcctcccatacacccttgggagattaattcaataatccttttgccaacttcttccatacttcaagaatctgtatgaatggtgtattcctggctgaatcaagtttataattttattctgttcaatatcctagtataatgacttctttggaaatagtttcccgacaagttattaagtcactgaggtctttatttaattttaatgtgaatttcctactggcgatgaagtccaagtttttctttgcaggaggcctagttttgagacaatgaagaaatttgaggcaatgtggtattccatagagtggatgtggctgtctcattcttgcaatacacacacacacacacacacacacaactggaaatctgttgtagttgtctttaagtctggctttgatctgaatcggaattctatgtgttgcttaataggatgcttagggcttaagagtaaggacaattacttcacttattaaatttagtatttatgcattattttcagtggcttaaacaccagaactttagaactgtgaaaatacaggctaggtacttgaggataagcagtgaataaaacaaaaatccgtgctctcaagtgccatacaatttactgaggggaaacagataatccacaagtaaatatgtaacatattgggtagtgttaagtgctgtaaagaaaagaaaagcatgtaagagggtagtgcgaacaaggatgtgtagtggaatgggggtgcagtttcagataacatggttaaggaaggcttttgattaggtgacattcctagaagataattttgccttgttgaagattttttaatagacatctttgggtgttttgtgaattattaattaatgagtattctatttagtaaatttaccacagatagcaagctttataagtttaatccaaaagcttgaaaatagatatttattaaaaatcggaatgaaacaaatgacatgttttcttagctttacacaaaccttagaaaagataattgcaacttttatggaactatttttgctttcataaatggatattcatttgctttcctcagcattcttatttcctactaagtccttaggctcttagcaactaatactggagttttgcatagttttcttgcctcaagtctcgctcctccatgccatctcttattatatcaggagattgacttttctaaaacaatctctttgccatcttgttcccctccttaagaacctccactaatgtcctattgccagtcaagttgagtcttagcacctcttgcttggcatttaaaatcttccagtcaggtttttgttacttgtataacttttacaagcataaagagaaccctttagttctgtacaaaggaaaggaattatgtgcagtgtattttgtgcaatattgtaaacatttgtttaaacaataaatcatcaatggtgctaaaattagtaggtgaaagtatgatgagaatcatgatattttacatagtctaagatatgtaaatactgtgtcactaggttttcccactayaaggatactgtgtttcttgttgaaattaataggtatttaaataataggtatttgaacaattaatacctattaattttgacaagaaacagagtatccttatagtggggaaacctagtaacacggcctaaccaaatgctgtattaataagttaacattactggaaatgagacatgttcatatcatgtgcctctagatgtaatgcactgacaaagatgcaacatcacttctgtggaattactcccaaaatatataacctgaacttaatcatgaggaaacatctacaaacccaaattgaggggcattctatgaaataactgaccattgttcttcaaaactgtcatggtcatgaaagttaaagatactctaaggaaatgcctatttttaaagaagacacaaggcaactaaatgcagggtgtgatcctggagttgattctggtccagaaaagaggacattagtaggacaattggaagtatttgaataaggtctgtagattagtttattgtattgtatcagtgttgattgcttggttttgaaattggactgtagctacgtaagatgttagtatttggggatgtgagatgaaggaaaattttcgtactatctttgtaacttttttgtaagtcaaattatttcaaaatgaaaagttaaaaaggtaaagtgttttagtactcaattaactcattgtgttaatgagcaaatgaatgaaggaaaagtttagataaagaatttcgtaggttcttatttgccaaggttatcagattttatttatgcctctgtaattaatttattttcccttttttcaacagcatgccatgatgatgtagttaagattgtgaatctagcttgcaaatataatctttgtatcataccaattggtggtaggtattgtgccttttgaattttaatatgtaaatttgttctatttaaaatatttgtattttaaatatttgcgtcaccctactgaaaacaaacattattgtaattgtgatgtggttattctcaaaaattggtcaatgatgctcatttttgttctaagtaggattccttaaactgtttgagacatggtataccttagttcatggctttttcctctatgggccctagttgaagctgtaatttaatgcctgaataacaaaatgtttctgctttagtaattactttttaacctgtatatttatggagagaattttctttttcaaaagctaaatataaatatgtcctatataaacctttgagattagcataggaatggtaataagactcccaacaattctagaagctccatattccctcttcagctgatgctttctgttgaatttatgcaaaaaaggcactaaaatgccatttattatgaaatatttttctaattccaaatgactgtgacaagcaaatagtggttactgatcacaggcatcacgttcttaaccaacagttcatgaactcactttgtaaaattacgctgaacyttacagattaacaccccctgtacttcttgtggaaggtgactttcacatgttttctttcatgcagaacttatggaagtatcagtcaagaatttattcgatatatggtgatttagatctggttaagaacagagaacattgttttgttctttaatggtatcaagaaggcatttttcctttgacagtaaatgttaagacaacagtgtgtttaaatacttctatgtattattctatrttaaaatcactttttcaccaaagaacatataaatgtttttaaatacctcataatctagacattttaagcttgtttctattctaatttattaaagcttttttgtataagaatataagattattttaaatgataaatgaatctcataattgtggtaaaaaggaagtaatgatgtctctagttgtataggatgggtctttttttcttttaagctacctctccatggtaattatctgcttagaacttttctaatcatgtttttggagttccacaaattgctaggggcttcacttgagtgtggcatttccaggggatggaaccatagcccattgctttcagttccgtaatattgcttcattttggcactcagcataaaataaaggtgagtttgcttttagtgtgttagcatttgcaagttgtattttgcaaagtattaataggtatcacttttctagtggccctatctgtwtacttgatatgagggatttgccatagaaatatagctaaaaacagaatatttaaacataaaagttgttgtttcctattttggcaggaggaacaagtgtttcatatggcctgatgtgtcctgcagatgagacaagaacaattatttctttggacacttcacaaatggtatttaataatttgagatatatttaaaacattttctttattggctccaccttaattgtcattaaaaaagaatctagccactgggcgctgtggctcacgcttgtaatcccagcacytggggaggctgaggtgggtggatcacttgaggtcgggagttcgagaccagccaggccaacatagcaaaacctcatctctactaaaaatacaaaaattaaccgagtgtggtggtgtgtgcctgtaatcccagctacttgggaggctgagacataagactcgcttgaacccaggaggtggaggttgcagtgagccaagatcacaccactgcactccagcctgggtgacaaaaaaaaaaaaaaaaaaagaatctaatatccattttgttttaaatgtatttcatcattacattttacccttgtattcagttctccaaaaggtaggtttacttttaccctcaggtatatatgttgatggctattttaccaaatttgaatttttttttcaaatacctaagtagagagaatagtttacccattttttagatgaagtcgttattaacattttgtcatactttctttatctttcttttttttctagtagttttagagcaaattctgatacaatgctactttacatgtaaatatttctgtataatctcgtttaaaaaggacattttctcacataactattattatcactcctggcaaaatcaaaagtaattctttatgttatttagtagttagtctacattaaatttttgataaaaagtgtctgttttatagttcatttgttcaaatggggatccagacaaggctcacatttgctttccattgtagctcttaagtctcactttatgtaaaagcttcatcttactccctgtttttttcttttgaatgttatagacttttgaagaaacaaggttatttgtagtatagaatgtcatattttgaatttatctgttgctgcttcttgtcatttaactctttatctaagccctgtatgtccactaaattagaagttccatataaagtctagttagattcaggcattgcctttttttggttttgtttttacagcaagaatccctcatagatggtaatgtgcttttaaaaaaatgtcacataacatcaatagaggtgtgtagtagctgattgtctcacttttagtgatgctaaaattgatcaagttcagatggtgaacactttattttattgtaaggttccccattaacctatctccttatcccagattttaagaaaaggcaatttatttcctcagaagatagctgaagaatagcctgttctggaatgttaacatgggtttggtagtatatatgggatgtaatagggtagcctatatgttttctttaggtttttctgtgagtgcctatgaagttttttctgcttcttttaatttcctttttctaccaaaagatatgtttgaactcttggtagctacaaggtatatatttagaatgagtatgtaattgcctcaagggccagtctgttgggggagaagatatatatataaggtaccatcagatcaataaattctttgtcttttcattctgcaatttaataatactgtcttttgtttagctgccaaaggaccaaaagcctgattataccatagttgtattgaagttactgttgtcagccaggcgtggtggctcacgcctgtaatcccagcactttgggaggctgaggtgggcagatcatctgaggccaggagttctagaccagcctggccaatgtggtgaaaccctgtccctactaaaaatacaaaaattagccaggtgtggtggcgtgtgcctgtaaacccagctactcaggaggctgaggcaggagaattgcttgaacccaggaggcagaggttgcagtgagccaagatcatgccactgcactccagcctgggtgacagagcaagactctgtctcaaaaaaaaaaaaaaaaaaaagaaagaaagaaattactactgtcttatagtgagagtataattatgagttttatgtaacataaaactaaaagtgcattcacatacatcatcttatttaatgtttttcacaacgctgtgaattaagcagtgcagttatttgtatgtgttcagatttggaatgtaggcagcaactgctatttttgtattgtctgttgtgctctttcctttttattattaagtagatttatctatgttagtttttgccgtgaaattgagcatatgaaagtagaaagaaagcttccctgggatccagaagaaggttctatatgttacccaattgctcagccagatagaaaggggaaagaagtctgctcttaatagtagaaagtaattcatgaaaattcatatatgtatataaaagttaggtcaaataagaatgccaaataacattttttattggcagtcatacgtttggtaagttgagccagatgaaatttagttccttcttttgagcccgaggcagggatttgctttgttttgtacatggggtctctggccctgttttgaattaaaaataaagtagggatgccatctgctatattcaaatgtccttgcagattgttttttctaatcttatggtcatattctgatattcttaaattagatagtgattgctatgttaacacagagcagatagtatttgcacaatgccaggacctgtatatgctgtttttttacatggagtacctcatttaattattgtagccaacactttatgtattattactattttacattttacaaatgaggaaacaataagcttagacagttaaataatttgcctaaggtaagagaaggaatttaaattaacctctgaataaagacagagtctatgttttaagccaacccctgcataatatgctgcctttgttactatgttgtcatgttgtatagtctgggataagtggacttggtttccagtgtgggtggttgaggggaacccttcttgcttaatcactgtcttaccacttgttgctttgaattaggaagttatatttcctgagaaaatattagtagttcctggagatcagatttctttcttcctttgcaacagaatcgaattctctgggttgatgagaacaatttgacagctcatgtrgaggctggcataacaggacaagagttggaaagacaggtatgttatttatttttcttatttttttaaattaacttattctaatatcaattctgatgttatttctttaatgaaagttttcaaaactgtatcccctctatgaatgaaataccttttatgatacattcattcactcaaagaatttgtttagtttctattatgggtcaagcattgagctagattctgaggacatgatagtgaataaggcattgtctgctaccttcaggtagcttagattaggacagaaagttcgataaataattaattatttggagtgaaaattgctatgtggatgctaaatgcagggtattatggatcatcaaatggggctaggtgggaacgagttgggcaaagaaggtatcacatagaacctggcattttttttgttgttgttagtactgagtcagtggcaaaggacacagcatttaaaatgagacttcaggatgagtctgagttagcaaaaaaggaaagaacaatccagaggaaggagcatacatgcagggcttctcagggtgactgttacttttttttttttattttttttgagacggagtctcactctgtcgcccaggctggagtgcagtgacgtgatctcggttcactgcaagctccgcctcctgggttcatgccattctcctgcctcagcctccccagtagctgggactacaggcacccactaccgcgcctggctaattttttgtatttttagtaggacggcgtttcaccgtggtctcggatctcctgacctcgtgatccgcccgcctcggcctcctgaagtgttgggattacaggcgtgagccaccacgcctggccgactgttgcttttgagggtctgcagatagctgaatatggctgaaggctagtgtgtgtatgggagaacatgtcttcttggtatttgtatattgggtgggtgtgggtacagtagtggtaaaggatcaagccaggaaaacatgaagagttcagatcataaagggccttataaagccccttttagaagtttgaactttacttttttactggtattgttctggctgctgtgtggtgaaatgggtggtctatgtaagggtggactaagagactgcaacaataatttaggcaagagctgagagtgacatgaagtagtagaaatggaacaaaatggaacagtttgaacatggaattctaggatcttggtgatatatttcatcagctgggtgaatattggtattcattgaacttttcagtgtgcaatttcattgacaactactcatttcataaattcatgaaattcttggagttcttatagtacctttttgggatcctaatgaatttttggaaaactttaggtttctttcatagattctaagcaggtaatagtgaaaataaattggttccttcaacttcctcaaacataatcaagataacgataactcagcttttgtaaacaaaaattagaaagtccaatttgttagtgatgtactgaccattttgttcaacttgggttatagagacccctctcctccaaacctttaataggaagagatgtgatgtgattgttatcttattttgttgttgttttcttttctttcttgaaaagttgattgacattgatctgctcctgaccatttctggatgataggctttgaaaaaaaatgattaaactatttattttttatttaatgcagtcagatgcagataactggaataaaattgaacttatttgttgagacagtgttaaagatcctcaataaattaaggttttatatcagataaatagatttatcaattattatagtttataatgaactttagtgggcagaataatagtatttaatgaaaaaacctctaaaaagtcctgtatcagtattccattatgcttaaatgaggcattatcagcacagcacttttttttataacaaagaatggccttttatgtcaccaattttgtatctttattatagcatttgatgtagtattttaacctttccaagttttcttttttttttttaaaggttagaattaaaattcaaggaacatatttccttgaaatttaaatgacattttcccagactaggaacttctgatattttacctactagttcatttccctaaatgccgatatagaactttcttttttgcctccagtaggctataatgtagttcctacagctattttgatcccagtaaaagttcttcctcattaaacttttgtgtccttcagattctacttcagttgaggtaaccagtttaaaacatcctggcttttctttctgcaagcttaaaatgacacaaatacagtagttgggtagcacagattttaatcgctttaacttgtaaatcacattgatgttaacatgataaaatttaatggaagctgctaacatgtcaattatggatttggagaatttttcctacgtttattaaatctttggctacttttattggttaatagtctgaggttatctgactcgaatttttttttttctgcttaggcacatcatcactaataacctcacattatctttctttgtttctaatagctattagctctcactgcaaacctcaatatagctcctagctgtgtgaccttgggcaagttactcacctttaagcctcagtttctttacctataaagtgggtatcataattcctacttcgtggggtttttcatcaagatgaaataagttaataatgtgaactacttagaactttgattcattccactaatttttattgagcactatttgcttcattcaggctaacagactttaaatattctttttatgtgctgtagactccaaaatttatattatcatcctagacttctttgctgaactgatatagccacttgcctaattgatatctccacttgcgtatttacagacatttcaaactccgcattttaaaaactgaatttttagaggaaaaatttgcaatcttgtctccaaaatgtgtctgttctgtagccgccttcttctcttcaggagatggaaattcaattccttaggcagcttggaccacaatctttgaagtcatagatttttgttttatattgctttataatagcttgagatataattatgatctaatatgtacaatttaatgtgtacaatttgataagtttcgacatatgaatataaccatgaaaccatcatcacaatcaagataatgaacatatccaccaaccccaaaagttttcctctttctcctttataatcctttcccactcccacccacaacccttaagcaaccccccaggaatcactgatttgctttctgtcacrtagatttgcttaaattccctacaattttaataaagtggaatcctacagtatgtatgggaggagggtctggcttctttcactaggcataattattttgaaattcagccatattgttgcatttatcagtagttcatttctttttgttgctcagcagtattccattgtatagatatgccactgttttgtttatacattcacctgttgatgaacacttggattatttctagttttgggctattacaaacaaagctgctatgaacgttcatgtgaaagtttttgtatagacatatacatttgtttcctttcggtaagtaactggaaatggaatgaatagatcaaaatggtaggtatatatttacctttttgagaaactatgaagttttttcccagagtgattatatcattttatattcccaccagcactgtataagagttccagtttctccatatccttgccaatactttgtattgttagtctttttaattttagtctaaactttagtaggtacatagtagtatcttattgtaggtttgttttgttttgttttttgagacagtgtctcatgctgctgcctgagctggagtgcagtggcacgatcatggctcactgcagccttgacctccctgggcttaggcaatcctcccacttcagcttcctgagtaactgagaccacaggcaagtgccaccatgcctggataatctttatatttttctgtagagatggaattttttgccatgttgcccaggctgttcctgaactcctgggctcaagtgttctgcccaccttggccttccaaagtgttgggattataggctcgggcccctgtgtctggcctcattgtagttttaatttatatttctctaatgactagtgatgttgaacatcttttcatgtgcttatttgccatccatattctttattggtgaagttctccttaaattatttgcccaattttttttttttgagatggagtgtcgctctgttgtccaggctggagtgcagtggtgtgatctcggctcactgcaagctccgcctcccgggttcatgccattctcctgcctcagcctccccagtagctgggactacaggcgcccaccaccatgcctggctaattttttgtatttttagtagagacgggttttcaccgcgttagccaggatggtcttgatctcctgaccttgtgatccatctacctcggcctcccaaagtgctaggattacaggtatcagccaccacgcccagcctatttgcccaattttaagattgggttgttttcttattattgagttttggaattctttatttattctgggaataagtcttttttcagatatatgctttgcaaatattttctttcagtctgtggtttctcttttcattttcttacactatcttttgaagaccagctgtgtttaatttttatgaagcccagtgtattaatttgtctttctatcatgcttctgctgttgtgtcataatgcaaggttatagagattttctcccatttgagttttataatttttagtcttagatttaggtctctaatcagttttgaagatttctgagttattatttgtatatggtataaaattggattgaagttaatgatttttgcacatggatatccaattgttcagcaccatttattggaaaagattatcctttcttcactgagttgactttgcaccatcatttaaaaaaatctgttgtctatatatgtctgcttctagttctggactctatatatgtctctgtgctaatactatactgtttggattactatagctttatcacgagtctttttcaaagttgttttggctattctaggttctttgtatttctatatgaacttcatgttcatatggaaatgtcagtttctgttaaaaaaagaaaaagtcccattgggattttgattgggattgcattgactctatatatcagtttgaggagactgacagcttaacagttttgattcttctgacctgacccatgaacatggtatatctttagttttttgtaggtctgtaatttctctcagcagtgtcttacggttttctatgtacatgtctttcatatatatatatatatayacatatatgtatatatgtatatatatattttagagacaagatctcattctgttgcccaggctggagtctagtggcrccatcatagctcactgtaaccttaaactcctgggcttaaatgatcctcctgctacagcctccccagtagctaggactacaggcatgtgccaccatgcttggctaattttttaatttttctggagacagggtcttgccatattgctgaractggtctcaaacttctcgcttcaacctaccaccctggcctcccaaagtgttgggattatcggtatgagccaccatacctggcctcgtatatttttaaaaacaggatttgtccctaagtagtacatattttttggtgctgttgtaattggtatttttaaaaattgtcagtttctggttgttctttaatagtgtataaaaatacagttttttatactgatcttatatcctgcaactttactaaattcactaaattttaactttttttttgtagatctcattggattttttacatagatgactatgttgtgtgtgaataaagacagttttctttctttctttccaatctgtttgcctttttttctttttcttacctgattgtactggccagataatgttgaaaagaagcgagacttgtttctgatttaggagagatgtgttcagtcctttaactattaagtatttgttaactataggtgttttttgtagatgccctttatcaagttgaagaagtccctttcttgtgttartttatagagtttgaattaggaatggatgttggatttgtgaaaaaaatgttattttgtgtcttatagttgaggttaagttgaagtaatttatttgagttcagtcttattttctaaagtagaaaatcagtgctgattttttcccaattgttgctttagtgacatgccaccaattttgatatgtttattttcattaatttgaaaatattttctacttctttgattttttctttgatctatggtttactcaccatgtatatatgttatttagttcccaattattttgggatttttccagatatctttctgtcattgatttctatattaattttgttgtgttcagaaaacatactttatatgacttgaatcctttcaaatttattactacttgttttatggcccacagtacagcctatttttaaaatgttccatgtgcacttgcaaagaatgtgttttcctgctgctgtttggtgaagtagtctttaaatgtctgttaggtcagattgacttataatgtaattcaggtctcttatattttttattttctgtctacttgttctgtcagttattgaaggggggtattaaaacctccaacagtaattgtagatttgtatatttcttctgcagttctatttttgcttggtgtattttaaagctcggttattaggaggataaatgttcaggattgttatggcttctcgattaactgacccttttgtcgttatgaaatgacctcctttatgtgtgataacatgctttgctctgaaatctgctttttctgatactaaaatagctattggagttttcttagcatggtatatctttttgctttttccattattttactcttaattagtttgtatctttatatttagaatgtttttcttataggcagcatataattggttcttttctttttatctaagttgacaatcactaccttttcattgaggtgtttagatcatttaccttcagtgtgatttattgtggtttagtttaaatctgtcatcttgctattcattttctgtatttcccatctgtttttgttcttctttccctcttttactgcctttttgggatttttttttaaatgatatgctttatctctttagtttctttagtagttttaagtttttgttttgttttaggatttgaagtatacatctttaacttgtgtcagctacctttgagtgatattgtaatactttgcagtatcatttaaaaaatttaaataatatgaaagcatcttgtgtatttacccatctagttaacctttcctatacccttaattttgtctgatgttatttgccttctgcttgaaggacttcttttaacatgactttagtgtgggtctgctgttggcaaattctaattttgtctgaagaagtctttatttcacctttgtttttaaaaaagatatttgaagtgagtatataattgtagattgatattctttcagcagtacaaagatgttgctccactgttacctacttyattgcttttcatgagaaatctgatattatctttgtctttgtttctgtgtatgtaatatgctttttccccctctggctactttttttttttttctttgagacagagagtttcactcttgttacccaggctggagtgcagtggcctgatatcggctcaccacaacctccgtctcccaggttcaagcgattctcctgcctcagcctccagagtagctgggattacaggcatgccccaccacgcccagctaatactatatttttagtagagatggggttttaccatgttggtcaggctggtctaaaactcctgacctctgatgttccactgcctcagcctcccaaaatgctgggattataggcatgagccaccacagccagcctaggttgcagactttacgacacttaacttaaatacatcagcaccatctcctaaagacagaagaatagtgttcttcttyataactataataccattatcatgtctaagaaaatcagtagtaatttttttttttttttttttttttggagacagagtcttactctgtcgctcagcaggctggagtgcagtggttcaccacaacctctgcctcccgggttcaagtgattctcctacctcagcctcccaagtagctgggattacaagcttgagccaccatgcccggctaattttgtatttttagtagagacggggtttctccatgttggtcaggctggtctcgaactcccgatctcaggtgatccgcccacctcggcctcccaaagtgctgggattataggcgtgagccactgtgcccagccccctctggctactttttttttttttttttttttttttttttttttttttttttgagacggagtctcgctctgtcgcccaggtcggactgcggactgcagtggcgcaatctcggctcactgcaagctccgcttcccgggttcacgccattctcctgcctcagcctcccgagtagctgggactacaggcgcccgccaccgcgcccggctaattttttgtatttttagtagagacggggtttcaccttgttagccaggatggtctcgatctcctgacctcatgatccacccgcctcggcctcccaaagtgctgggattacaggcgtgagccaccgcgcccggcccctctggctacttttaagattttcttgttatcactggtttgagcaatttgattgtcatggaccttggtgtagtttttctctgtgtttcttttgttgaggattcgttaagcttttttgatttgtggctttatagttttcatcaaattttgaaaaactttgtccattatttcttcaactatccaataaacccccctccccgctgacctttagggactctatttactcacttattaggctctttgaagttccacagctcactgctactcttctcatttttttcttttagttcctgttgctatgtcttgaagttcactactgttttattttgctatgtcttttctgctcttaatcccattaaatatatttttaatctcagacattatatttttcatctccagatgtttaatttgggcctttttatatcttgcatgtctctactttttgaacatatagaatacagttataataactgttttaatgttcttgtcagctgtgtctaacgtctgtgttagttctggattggttttgattattcaccccataatgattatggggtgttttcccgcttctttgtagcttggtaatttttatttttattttatatatattttatttttatttttaattttatatttttaattttgaatggtaatttttgattagatggtagccattgtgaatttcgatgtttttcagttctacaaatattcttcagcttttctcctgggatgcacttatgtggaaacagttgatcctctagttcttgcttttatgatcttttgcttttttcagtctgagactaattactttccactactgtggtatgacattgttggatatcctacctaatactctgtgaattaatagttttctcagttggactagtggaaacaggtactgtttctggccctctgtgagtgctggcactattctctaatctactggtgtccagccctttgaatgtgaggacttttttggtggcagatatcatgaaaattatgcatagacctttttttttttaagctcatcagctgttgttagtattagtgtattttatgggtggcccaagacaattcttcttctttcagcgtggcccagggaagccaaaaggctggacacccgtgctgtaatccatctggagtatatcttcctctggtctttggtatttcactcacttgcatttacttttcagtactctgctgaagacctgaggggcacactctgcagatctccaggcacctctctttgtgctgcttttttctgtactttttcctgtgaactctaaatgccttgattgccttgactgagctctatgctcaatctcaactcagtgtttgccaagttgtgcctggattctgtttctgtggagcgctaaactagggtcaagtcacagtgctcatcacctgtgtttactttctcataggatcaccgtccttcctgactgcaagttcagtgtttgaaaactttttttttttcttttttaaaatacaaggatggagtctcgctttgttgcccaggttggtcttgagctcctggcatcaagtgatcttcctgcctcagcctcctaaagtgttaggattacaggtgtgagccaccatgcctggcctgtttcttctatttttctgtgttttagtcttattgggtgggagggtaaatcctagctcctttaacttcagtttgggtagagggggaagttcctgctctgctttttatttttttcatcacacttctaattattctgtataatttaattatgattcttaatttcagtttcctttactatttctcctgtttttttttttagcagcatatacatttttctcaatattgctctataatataagcaccataatttagggattttttaaggaatatatctgaaggtcagcttgtagtcagtaaatatttgttgtttcagtattgaattggaacacaagtgagataaagcttttattcccctagagcttcatggcacatggtaaataaacacagttatttttatctagcgtcatatggggcagagatgttattttattaaaaaagaaatcttgagtcagacatggtggcttatgactataattccagcactttgggaggccaaagcaggaggaatgcttgagcccaggattggaggctgcaatgagccatgattgtgccattatactccagtttgggagacagagtgagaccctttcttggggaacgtggtgggtgaatatttgattaattgtatgagtaaatctgtggacctttcttcagcaaatttttcttaccagctaatggcattaacagagacacagaccttataggagaaagcggctaaatgtatatgatcttagataccatttattaagcacttactatgcaccagcagttgtttctcactaaatttgcatattgtggtatactgcggtatgcaaattttctagcaacagtaaatgacaaatttcaaacccagggatttttgtttgttttcttaaactttttggcaagaaaaaacccaggttttcaaccattacactttcttcacttatttagtaggaagttagtaagattttaaatgaagtaaatttaaattggtgtggtagagctcattcagcatggggaacatctggtttttttggtatctgtatcttttgctttacacaattcctggtatatagtacctgcttgtaattggagaagataatgaagtaacctacctgacaaaagaaacaaattaatcgtatatataatattggatatactgatagaaataaagtgtaacaccgcactgttaatactagacagatcaacgagacagaaaattaacaaggatattcaggacttgaactcagctctggaccaagcggacctaatagacatctacagaactctccaccccaaatcaacagaatatgtattcttctcagcacctcatcacacttattctaaaattgaccacgtaattggaagtaaaacactcctcagcaaatgcaaaagaacagaaatcataacaaacaatctctcagaccacagtgcaatcaaattagaactcaggaataagaaactcactcaaaaccgcacaactacttgaaaactgaacaacctgctcttgaatgactactgggtagataacgaaatgaaggcagaaataaagatattctttgaaaccagtgagaacgaagacacaatgtaccagaatctctgggacacatttaaagcagtgtgtagagggaaatttataacactaaatgcccacaagagaaagcagtgaggatctaaaattgacaccctaacatcaaaattaaaagaactagagaagcaacagcaaattcaaacactagcagaagacatgaaataactaagatcagagcagaactgaaggagatagagacacaagaaacccttcaaaaaatcagtgaatccaggagctgttttttgaaaataccaacaaaatagaccgctagctgactaataaagaagaaaagagagaagaatcaaatagatgcaataaaaaaagatacaggggatatcaccactgatcccacagaaatacaaactaccatcagagaatactataaatgcctctacacaaataaactagaaaatctagaagaaatggataaattcctggacacatacaccctcccaagtctaagccaggaagaagtcaaatccctcaataaaccaataagaagtcctgaaattgaggcagtaattaatagcctaccaaccaaaaaaagtacaggactagacggattcacagctgaattctaccagagatacaaagaggagctggtgtaccattccttctgaaactattccaaacaatagaaaaagagggactcctccctaactcattttatgaggccagcatcatcctgatatcaaaacctggcagagacacaacaaaaaaagaaaatttcaggctaatatccctgatgaacatcgatgcgaaaatccttaataaaatactggcaaaccgaacgaatccagcagcacatcaaaaagcttatccaccacaagcaagttggcttcatacctgggatgcaaggctggttcaacataygcaaataaatcaatgtaatccatcacataaacagaaccaaggacacaaaccacatgataatctcaatagatgcagaaaaggccttcaataaaattcaacaccccttcatgctaaaaactctcaataaactaggtatcgatggaacgtatctcaaaatattaagagctatttatgacaaacccacagccaatatcataccgaatgggcaaaagctggaagcattctctttgaaaactggcacaagacaaggatctcctctctcaccactcctattcaacatggtattggaagttctggccagggcaatcaggcaagagaaagaaataaagcgtattcaaataggaagagaggaagtcaaattgtctctgtttgcagatgacatgattgtatatttagaaaaccccatcgtctcagcccaaaatctccttaagctgataagcaacttccacaaagtctcaggatagggtgcaaaaatcacaagcattcctatacaccaataacagagagccaaatcatgagtgaactcctattcacaattgctactaagagaataaaatacctaggaatccaacttacaagggatgtgaaggacctcttcaaggagaactacaaactgctgctcaaggaaataagagagaacacaaacaaatggaaaaacattccatgctcatggataggaagaatcaatactatgaaaatggccatactgcccaaagtaatttgtagatgcaatgctattcccatcaagctaccacttactttcttcacagaattggaaaaaactactttaaacttcatatggaacaaaaaaagagcccacgtagccaagacaatcctggacaagaagaacaaagctggaggcatcatgctacctgacttcaaactatactacaaggccacagtaaccaaaacagcatgatactggtaccaaaacagatgtataggccaatggaaaagaacggaggcctcagaaataacaccacacatctacaaccatctaatctttcacaaacctgatacaagccatgggggaaagattccctgtttaatcaatggtgttgggaaaactggctagccatatgcagaaaactgaaactggaccccttccttacaccttatacaaaaatcaactcaagatggatcaaagacttaaatgcaagacctaggaccataaaaatcctagaagaaaacctggacaatgccatttaggacataggcatgggcaaagacttcatgtctaaaacaccaaaagcaatggcaacaaaagccaaaattgacaaatgggatttaattaacctaaagagcttctgcacagcaaaagaaactatcatcagagtgaacaggcaacctacagaatgggagaaaatttttgcaatctatccatctgacaaagggctaatatccagaatctacaaagaacataaacaaatttacaagaaaaaaacaaccccatcaaaaaatgggcaaaggatatgaacagacacttctcaaaagaagacatttatgcagccaacagacatatgaaaaaatgctcatcatcactggttattagcgaaatgcaaatcaaaaccacaatgagataccatttcacgccagttagaatggcaatcattaaaaaatcaagaaacaacatatgctggagaggttgtggaaaaataggaacgctcttatgctgttgggagtgtaaattagttcaaccattgtggaagacagtgtggcaatttctcaaggatctagaactagaaataccatttgacccagcaatcccattactgggtatatacccaaaggattataaatcagcctacgataaagacacatgcacatgtatgtttactgcagcactattcacaatagcaaagacttggaaccaacccaaatgtccatcaatgatagactggattaagaaaatgtggcacatatacaccatggaatactatgcagccataaaaaaggatgagttcatgtcctttgtggggacatggataaagctggaaaccatcattctcagcaaactatcacaagatcagaaaacaaaacaccacatgttctcactcataagtgggagttgaacaatgagtacacatggatacagggagaggaacatcacaccgtggggcctggggcgcggtgggaggctaggggagggataacattaggagaaatacctcatgtagatgatggattgatgggtgcagcaaaccaccatggcatgtgtatacctatgtaacaaaactgcacgttctgcacatgtaccccagaacttaaagtataatgataaaaaaaaatgcaagtaagaggtaccatttggggaaccatcagttaaaacaagtgatttaactgtttcccatctgtgaaaataggaataataatagtgtcagcttcatatggttgttgagcagattaaatgaattaacacacttaaaaaattagttaaagtgtgtacttaaagatttgcttctgtataatgtgaagtttgttttgtcatgacagtatgtgaaacctctcttttcagtacctggtacatcttagggctccatgaatgtctttttttcttttcccaatttcataaaattgagtaaaagtttatgttttaaaagaaaattgagtaacagtagtgttttaagagaaaataattcatagtattttgtttggagatggagttagggaagaaatataatgtaacagtctgataatcttcattttaayctcttcagccatttatttaagcttctttttaatagatggatattaatctcttaaaactaaataatatattgaatatttagtggagaaacttttattatataacagttgatgtcttttaaaatcttgttttcctagcagcaaaattagaatagatagagaatttgtattgctgatatgcaaaacctaacaaattatatttaacctaataggctttcatattttggattacaactttcacaccatacttaaatacaaatatacagacgtggctgacatattctacatagctgtgtggcttacttgaaaaatagaacagttgcttaactggatgactatcaaaatggtcaacacagattgatgggcttgagtgtagcagacagcgggtatgcagatggtggtgtctgtaccgtttgagaagagatggctgagtctttaaaatgatttcattggaatggctttggtggtgttgcagtaaagggcatctattcaatctcaggtgctgtgcagatggcaaagccaagataatatagaaaaatgagaaacaagtgactatttaatgtacagtaatgcatgatctgcatcacaaataaatgacgttattacatgcaggaaacctatccagatgcctgtacattaaaacacatgactccttgagagaattaagtacaggcaatttgctcggattttctgcaggcctgctgcatattacattagggtagagagaacaagagattaagtgctttatttattgaaagtgtttaggtaaagttggctgttatttaagcataatctgatctccataaatatttaaactatctctttgtagaaaaaaaaagtggggaaggacagctggccttaaaacaaaaggatgtaaggagtatgattatctggtcaacctgtgaaaaatagaacttcttttggcctacattttttaatcttgtaacattttccactaggcaaaagcttaaaaaaatttttaggactagtgtgataaaagtatcttttttttttttttttgctatgtaggaattaataaattcaaatatcaatgacatggaaattttaaagtgggaggagttaatgtgttgagtgctgtacgtaatgggaccattttcactgtaaaatgttaaatttttgtttttcagcttaaagaaagtggttattgtacaggtcatgaaccagattccctggagttcagtaytgtaggaggatgggtatctactcgcgcatcaggcatgaagaagaatatctatggcaatatcgaggacctggtaaatatttttctagttattatgtaataattgattagtatatagatattattataaaatgattagaagcctttaaaaattaagagttggggctgggcgcagtggccaatgcctgtaatcccagcactttgggaggccgaggcgggcggatcatgaggtcaggagatcgagaccatcctggctaacaaggtgaaaccccgtctctgctaaaaatacaaaaaaaaattagtcgggtgtggtggcgggctcctgtagtcccagctactcgggaggctgaggcaggagaatggcatgaacctgggaggcagagcttgcagtgagccgaaattgtgccactgcactccagcctgggcgacagagcgagattctgtctcaaaaaaaaaaaaaaaaaaaaagaaaaagagttggatggtagattcccccctcccataaataaactccttttgactataataacattggacatgtatagtagaaagttaatcaaaacacaactgtggtcattatttaaggatgccccttttcaggtgactacattttaagctttgtagatgtttcacagtatccagctcataaaatacggtcagctctctatatccactggtttcgtatccacaaattcaaccaaatgcagctcaaaaatatttggaaaaaaaaataacaataccacaaggaaaataatacaaaaaatatagtagaacaacaatttacatagtatttacattgtattattcataaatattctaaaatgatttaaagcatgtgagaggatgtgcataggttttatataaatactgtgctgttttatgtaagrgacttgagtactatggattttggtatcctcgaaggtcctagaaccagttctatggggatactgatggatgtctgtatacaaatattattttacaagcctcgtggaaatgaagtcttcaactctaccgtgattttagtccatttacttagatgatttcgtttttgctaytctgtttccttaggagattttgcatttttctgaaaataatttttcctgtatagaattaaataggctgattgaaattgttctaccaagtagtggtaagacctgtcatgttttatgtgcacactgctttttgtagctgatatggtgccactttgctgggagttagtataataatagtatataactctgggcaccctagttagggattaggtatcatttgttgctttttcaatgattagttgtgtgaatttgtacaaattggtttacgtttctaaacttcagtttcctcttctgtaaaatagaataatgatatttgctgcatagaattattgtgaggagtaaaggacataaaatgaaaactcaaaatctctggtgtgtagtaggtgcttcataaatgttgtttccttatcgtcaatattttcatagtagtttaaaagaactttaatttgagactattaaagtgatgttcccaacattattcctggagctatttagctttgcttttgaaatctaaagtttccacattttcatcaatatctttgttattaggaatattaaatctttaataaaatatattggttctttatagttaacactgaggaattaaaaacttttgtctatattgtgaatactttttaaatattttcattatcctatttatttttctttattcaaggcatttagaaaagcacatttttctttttgcaattaaaataacctaaattcagttttggggagaaaatttgatccttttgctattggattattaaggactttatcagagttaagcaaatatttggtaaacagctacatttagcactgtgaaatcatgtagtttattttaatcattttttggagatatttaagggatacaaattataagtgtacatcctagtgtaattatttgcattaataattacttagtgcattttattttattttattttattttgtttgtttttgagacagaatttcgctcttgttgcccaggctggagtgcagtggcacaatctcagctcactgcaacctccgcgtcccgggttcaagcgattctcctgcctcagcctccagagtagctcagattacaggcatgcaccaccatgcccagctaattttgtatttttagtagagatagggtttctccatgttggccaggctggtcttgaactcctgacctgaggtactcctcctgcctcggcctcccaaagtgctggaattacaggcatgagccaccgtgcccagccagcacgttttatttttaacttaaatttttaactctgcaatatatagtatcctctgaagctgtcttaatttatattgtttgcttttatgacaatttttctaaagttgatattcttttaatacatgtggctacaatggaacctgtgaaaaaattaaagaacgtgttaatatatttcgtaacattagtgcatatttaattaaagcacagtaacgatgctcatagcttatttaactgtttgaaaaaagttgaagatagttgtttagtccaaattttttaaaaatttaaaagttttaacatctgaagagtcagaagtctgtgtacaatgggatatacttttcatcttaaattctggttcccacttgttttcaagatcattttaaggaattccaactatagtccatctcaaatacttctcaatttagtgaatgtctcttcactaacggatttcctgagcatatctgattacactttcttgtgctagtgttacagagctgaagctcatcgctattagcggtaatccactgcttctatgaaaggagccttgctacattcttcagttatgaagcactgttagaaggaaaaacattgaactctgtagtgacaaaaccaaactaaaaattctggatcttcacaaaagaaagtaaagtatgatgcagtgagcatttcattttctgaagaaaatgcttcttttaaaattataattggaatagacaattcaagcaattagaaacttattttttatttaaaaatattcattacagaagtataaaaaatgtatgctatagctgggcatggtagttcacacctgtaatcccagcactttgagaggacaaggcttgaggccaggagttggagaccagcctgggcaacagagcaagatgtcatctctacaaaaaattaaaaaattagctgagcatggtagcacatacttgtagttctagctactcaggaggctggagtgggataattgcttgagcccaggagtttgaagttacagtgagctatcatcccaccactgcactccagcctgggtgacaaagcaagatcctattttttttttaagtgtcctgtgtatattaaatacatatcattttgaacattttaacatcttcgtattcatccttctgtcatgggattcttggggtgtcacttttttagccagaaacttctgtctggcggcacctttgcccaagttttgcttggggccactgggcttgttcagcccactcggcctggcaggctgtgcttggctcacgctgctggtctggatcccatgcttgccaacggcgagccaggcacagagtagtgaggggtgtgtgaatgagtgagtgtggagtctggccacagcgcacagtcaggcacgccagctgtggcaggacgggcagctccaggcatcagctccctacaaggctgctgctggaccaggcatactgcaagcagcttccattggtggcaccagggaatgtggtggtgcctggaagcttggagacgccagggactgcagagccccaaagagtgagccatagccctggctcagggagctcctaggtctgggctccttgaagggccacagctcttctctccttctctttcctctctttccctctcgttgccctccatggggcaaacaaggggygtgtttcagccctgtttgtgttacagccctttcagctccgccatttagcgggtcctgagtttttgtcccacatccaggaagaatgaggtatgcggacaagtggagggtgagcaaggtgaaggagtgctttattgagtgacaaaacagctcagaggagactcatattgggtagctcctttccgcaggtaggccatcctgatgagcatccagctctcagcagagagcccacagagggtagttcctctccacaggcagggcatcctgatgagtgtttagccctcaggagagaggagacacacagtgggtagctcctctccataagcagggcatcctgatgagtgtcagctctcagcagaaaggagatccacagtgggtagctccattctgcagacaggtaatcctggcatctgcctaattctggctgagtcctgggtttttatggggttcagaggggaggaagtttgtgctgattggtccatgggtggttatgggcaatcccggaaaaagcatcataagttcccactccagtccgtggaactggcagcccagcccccaggcgtcaggccctccctggcttgaaggtggggtttcaccggggaccrcccatttccgcccaggagcctgtctgcctcctgccactgtttatggtgcccagatgcccaggctgttcgtgctaagggcctcctgcaggccagtgccaagctgccctcagccagcacttatcctcccttctgtgctcattggtgcccaaagtctggagggggctgaggcagcagggtgctggcatgtcagcactgccctgagcatgcgcacacccggmtgggttgcaacagcacgcaggctcggcctcaacttttctccaagattggagcaggcactggaatggggagaagccaggcggtggaagcagacacttccgagcctgcaggggctgggggcttcccaggcccccaagagtgtagagatgcctgggtctgcagccacagctgggtggctgcagctgtgtccaggagggtaggattcctgcgtgcttccggcccccaagagcacagggatgcctgggtccagagccacagctgggctgccacagctgcactcaggaatgcgtggcttttgctctgccaactaggaagggggtggggcttccacctgtttccagctcccgttggctccatgcagtgcacagccctggtcatgccacccccactgcagccaatgtctttgcagcagccactccagatgggctgctggtgccatcacttctagaactgtttctaggcatgcaataagcacatgaatgtatctagtttttaatataaaaaagaggaccatatgtgtttcatctgctctttaaattatgtcatcaatatattaacatgtaaatgaacaggtttgcaccattgtttttaaagagttatataattcttttattgagaatgcatggtttatttaactccctcttaatgaacatttaaattattcttgatttcagaattacagaaaataaaggaaaaatattctttttaaaatttctttggtatatacatctttaatcattttctttgggtaagctcctttagttgatttgttggatcaagaagtttatacattttagactttggatccttacagccaaattgccctataaaaattttgtaccaattgacattctcactaacaccatgagaatctttgtawtttactggacgtcttatttatgtttttgtattttgttaattgctagtgaatgtaaacttttaaggggtcctcattggcaatttttattttgtattttgtgtattgcttattgatgttctctgctcatttccttcaataataaatagactgttgttatttatcggtccaaaattcattctaaaaatattttggatttttacctaaccacttctgattcagatctcaggaactatttttagagtgatcctacttccccagtatacttactttctcatttgtatgatgagtcacacatctctttccttctcttaagttcagtcattgtttctactgcttcatcccaatttgacctgatcataattaatatttaattcttttcactgttttctactaagtgggattgaaggtggggataaagggagaataatttttttcttagaattctaagtgtctagagcagtgcctgacatgaataatatgcttcataaaggttatgattattgcttagtttttgagtccgttagttctgtgccatatggataaccctaaatttggtttaaataaatgtgttattctgttgttcttaagataataaataaaccactttaaatcaagagatgtacaatcttagaatggtttttccctcttttaaggttatatacaaatttaactttagtctaaaaattactaaaagatactagaattcttaaaagcatcacaatttattacttaacccaatactttaaaagtaggttttacataaatatatataaatgtctgtacatagacacacattcactaacagatgtctagaatttacatcgtgtattgtattaaacaggtggttcatataaaaatggtaacacctagaggtataatagaaaaaagctgtcaaggacctcgtatgtcaacaggccctgatatccatcacttcatcatgggatctgaaggtaaatataactgtaaatttattaagaaaaaatacaggttagtcatgcagttttgtgaaaatctttatattgtgacatcagatctttgaaagacatgttttatatgtttaaggaattttttaaatttttatcattttaagactataaagttttattatgagaacatctgattaaacttcctcttacattttgcttttttatgtttctagagacagcttgatcttttaatttttattttagaatttttaatgaatttcaggaaaagtggtcattaggatttaaaatggtttattttgacattttgtattatagtattcttaaatcttgtcagaattatcggaggaaaggattgataaagcattatcttattgtcttgtctttctgtaattatgtattttataaaattaattactattagaagtggaatttaaaattctggttcacatatattttaaacttttgttggtcttttaatttttcactacacaaatagtatcattttcttggttacttaatgctgggtggatttgaatgtagttcatctcgtctaaaacatttaagtcctgtgcagatctggaaagaagtaaccttaaaataattattatgtaggcatggtgaattgtatggataaagtaaacatgggcttatttttcaatttttaggatgggagagggacattccttaaattcagagaaataaattaaaataaacaagtgtttctacattaacagaggagctcattattcacttcagaaggtggtccaagctgcagaagatatattttggtaacatttakctatattcatgaataaaagagcaggtacaataaactaagatgttaggcataaattctattctttgacagtaacatcaaagagggaaagtataataaactatgtttcttagtgatgtggtagagatcagttgtttggctgatgaccagtagtattgcttagatgtttttcatggtaaccaatgacagacctttgtcaagatatctcaccagtttactcagtttattccttttctgatcagcatactcttctatgaaaaaacaaaactatatttgtaataagaaaaataatcttaaattcatttaaaataatatggttacttaatattattctgggacttcttatactaatgcatcatctacaaattagaggaatgtaactttttgccatcagaagtcaagttgaataacgaaaatagctattaaaactcataatttttcattacattattgatatttacataattggagtcaactctataaatataaataatttttttttcaaatagccacattatacttttttttctcccatcagttagccttttaaaaattctagttgctagatattatgctgggacatttgagacagataataacagacaattatacaacagcgtgacaaattacatgatcaagtaaaatgcagaagaaatatgaacaagatgaagttgataggtgcttacaaaggcttccccagggaggccatacctaaagtggtctttgaggttgataagaagaaaataattccaggtcaagttgagggaagacagaagaggggagttgccctgcagagtgaccatcatgttggtgggcttagaaatgagaaagggccatgtctgcctcattatgaggctgctggtttttcagtatgactggaatgtaaggtttaattgtggagtagaacaggcagcaggtctaggagcagaatggtaagggctacagggtagttcgagagataatttggtcttttcatgccttttaaaatgatttgaacttttatctaaaagactgggctacctccgtaggtagtcactaactgtatgaatttaaggaagggacaaagttattatagtaaagtaagcaaagaactataagagattgggctgggcgtggtggctcacacctgtaatcccagcactttgcaaggctgaggcgggtggatcacttgaggtcaggcattcaagaccagcctgaccaacatgttgaaaccccatctctactaaaaatacaaaaattagtcgggtgtggtggtgcatgcctgtaatcccagctacttgagaggctgaagcacaagaatcgcttgaacccgggaggcagagattacagactgcagtgagcctagattatgccactacactccagcctgggtgatggagtgagactttgtctcaaaaaaaaaaaaaaaagaaaaaaaaaagaaatatttaaaatttatgagactaaattaccatagttaaatgagattttattacaaagtacatgcaacatagcatactgataaaagagcatgaaccatgaagtctttatcagatctggatttccatcctgattctactacttatatttccatgactttgtataagttagataattttcagtgcccggtgtcctcagccataaaatgggaataataaaattattcatcttcataagtgtgttataaggattaagtgagattatgctgaacaatttagtgtagtaaatactgttgtagctgcttattattttgatatcagtgatctttacaatttatggtccctaatccccatttcagtttgtgaatatagagttattttaatataggccaggagacagcatgattgaaatagtaaatttatatgaaatcatattcttacgtaaaatgtattttatctgctactttgacctacctgtgtaataacttcctgccttaaatgtgaatcataaacttttcttgagctttaaaaaaatttctttcagttaaatcatttgatgacaaccttgaaagtattactatccaaaaacctattttctccatccgactaagctctatacgtgattaaccatattaagtttaatgtgtttgtcttgttttgtgttatgaatttttcatgatttttttcaacaagtagctttctcctattttagatgctataacatgatcagtataatgaaaaatgtaataaatattcaagcatttgaaatgctttccattctgtttctatatatggtatttactatatatggatttgctcttttatttgaaaaacaaagtacatttttgttttttaacccatgactcacccttcttttagtctttgtctacaattaaagagatggaatactcaatgtcagttcttttgtaaagtttcactagttattctttgcttaaatgaagatcatcctttggtagtttcctcaggaaaggcacatttatatatccccagagttctggaatgttccaaactggttttctgtggctgtgatacttgaaggacagcttgagtgaatataccttttggtcattaatttctttaagtttctttaaaatgctatttccactgttactttgttttatatattattttaaagaaatatgatacctgtttaattttcttagtaggctaattttctctttttgcctggaggccttgaggattttttttctttattgctaaagtctaatacttttgcaacttagagttgatagtcctgggttattttgcttcagcacccagtggaccctttctatttgtagattcaggtctccttttatttctgtaaagtttttttttggatagtagtgttaaatattagggttttttttttcattgtttcagttttcatcctcggggacattgattatacgtatgtttgactttctttgctagttttccatttcagtcactttttctctgaccctttttctctgacttcttaattttcattctcttgattatttttctggttttttttttcaatgccctgtattaagttttaatttaaatctattttgtattctcctttgggtagtttataacatagcctttactttttacgtgactttttttggttctgtttctttcctcaggttagtcagctcttgtttcatttcttgttgttggtttttgtttgtttgtatttctgattcaaggtattttttcatatccctgttgcttgattgatgatatttaattcatgttgtgttacagctttcttcagratcgtggctggttttagggtggagacttttcaccaatagtaatgtttttattggcgttttctgacttttgtagttgttttgtttacagatctgatatgcctttttctagtcctatttgttacttggaaagggctcctattttgagartgttctttcctgacacttctaccctctgctatgctatttgtttataaatggtggtgtttttagtgaaggaagaattggcatgtcttgtttctctttcatttctatagggtctttaatttctctttattattttattctttctctttactggcttgtctgcaaggagtccacatacttttacgtgtgtacacgtgtacacatcttgcttctccaaggcagccatttctggttccttccattttcaaacttcttcccatagccagggctatggactaccaagtcctgtataatattttggcattattawtgcactttygttttctgggagtaattttggctgtacttcctctagttcctctgttactctctactttttgtgtgtagtcttttaataagactccttttatttacttttcatacttataagcttatagcagctggaaggctacaggaaatctgttggaattttttctttttatctctacttagaggtaatttgaaagttgcagtgttttttgtttccttgtatgctgaagatctaggtcctgtgtggctttgttttccttgttgattatattttggggagttgaagaaaatagagggagagaaaagattcataatcaaatgcctgctgtgcttaatccttaagtcctgagaatatattttcaaattatgagagtcacttcaagcaaatacttgcattttatatcaaacagcatttgaagccttcagttttctttgagaacaaacatatttgaaaattataaaacagaaaattctgaagtttattgacactatttttttttaagcagaatggaaagtgaatgacatacaagcctctctgatgtcacattgccatggagttatttggaaacaattatacaaagtgaatataaagtactggcataacatacatataattaagtaataaataatttaagtagttttatatcactctgttgacataatattcccagaaaaaaagaatcaataaatacattaaaactctacataaatgggccttttgatgcagtgaatttggaatatccatttgtgattagctgagtttgaacttaagtcagaatggaagctgcccctgtcaaactgcatttgggacctggatggatttttatcttacactgggaccatgcagaattcctagctggcttgttgcacagactcaccttggtcatttcattaaccttgcagtaatgcaatgcctcgttttatactactaatttttaaaagtctcatttataaatttatggtgagtttcactactttagattgcctgcagtatatatatgaagcaatatacagaaatttaagtcatgatgccttcttactagtaccttagaattttgatgtagaatgagaattttaaagaaagtttgttaatgtaacagtatatacatttaagaataaactttttgaataagtaataacttgtacatttataaaatttggatatgtagaaacatgggaaattcaaaagttactcaagaatgttatagggaaaaatttgcctcctatccctgtcttacaggcatcttccctgtccaaaggcaacactattgctacatataactgatgcaggatttttgttccttagctcagctaaaatcttgttgtatgactaggaaaaaattagccatgcagacacgttgaaaggtgaggagggcggaagttattaaaagaaagctctcagcaaaaaaaggggttctgccaacaggctcccacctcacagattgaataccaggccaccacatgcacaagctgaagagcccaggcttcttccccctgcacaagacacacattcctggtgactgtaccccactcttccagtgcacaggcgggcccccagtctgctgtgggcatgcccagacaaggccttggttaggttccctcatctgcacaaaagcatctgatgtaaacacttgtggagcgggttagagattctctgggaccctcccttatctgcctcctgtatctaccataaccatctatgtatatattttttaaaaaacaaatgggagcttactattctttgctcatcacatttagagccagttcattctttctgacagctgcatgatattccattcattgaatataccctgatgtatttaaccaaacccctgttggttggcatttaagtggtgtccaattttgtctttggcttatatttagattacaatgctgtgattcaaataaatattctcaaatgtcttcatttcttagaacttaggaaatatttcaccaaaagcttagaacttggagtttggttctgaatagaaatgttttcctggttaaagtcagggtttatactcaccttctttaatgaatttcaatcttgtgagttttgagtttgatcaagtggttattaaagttttccatagtctatggacagataagagcaaatagaagagatgattcatgccttaggaatttctgcctgacaaatttccaatttatttgtaacaacaactaactgtgaacatgagatgttaattccaagataccaggaatttctaaaagtgttgaaaagagtggaaagaatgacagataatcttagtgatattgtcagtatagtggaaggaaattcgcaaattaaagtgatactacttgtcttggtgagaaagagtaggtgtggtagataattctgtgttagggggtaagacagcatagtactaataggtaacctgtcaaccctttgcctcttctgacaaagttttggaaattcacctcagaaagaaactgtatcttttagctatcaccattcctccttccagctccccagcaatcctgccccaagccctaagcaactactgatcttcttttgatctctatagatttgcctgttctggaaattacacagacttggaattatataatatgtaatcttatgactggcttctttcacttaccacattttaaagattcaacagttgtgtgtatcagtacctcattcctttttttataactgaataatattccaccgcatgcatattctacattttgttactccattcattactgagattgtttccacattttggctgttatgaattgtgctgcattaaacatttatgtacaaacttttgtgtgacatatttttattttkgggggtttatagcctaggagtggagttgctggccatataagtcataaccctatgtttcaccatttgaagaatagccagactgttttctagcatggctgcaccattttacattcccacaagcagtaaatgacggtcccattttctctaagttatgtaatttattgctatacagttgttcatagtgttcctttataatcctttttatttttgtaagattactagtaatatcccctattttatttccacttctagtgatttgtgtcctgtctctttttttctcggtcactttagctaaagatttgttaattttattgatctttttggagaactaccttttggtttcattgattattttttattggttttctatccttgatctcatcaatttcacctctaatctctaataattccttctgtctgcttgtattagatgtagtttgctcttctttttctagtagcttaaggtagaaggttaggctatttgagatttaaaaaaatatgtacagatatttaccatcacaatttctctctaggtattgctttactttatctgataagttttggtatattgtgtcttcctttccattcttctcaaactgttttccaatttccctgttgatttcttctttgactcgattatttagtagtgtattgtttaattttcacatattagttagctttccaatttctttcttatcagtttcttatttcattccattgtggcttgagaacatactttgtattatttcagtctttgaaaatttgttcaagtttattttatgacctcgctagcatgtagtctgtcctggagaatgttctgtgagcacttgaaataaatgtacattcttctgttgttgggtggagtgttctattctgttaggtctaattggtttatagtgtacaagtcctattgccttcttggtcttgtgcctagttgttgtgtccattatagaaagtaaggcattgaagtctccaactgttattgttgaattatctatttctcccttcatttctgtcagtttttgcttcatatatttttgtgccttgttattaggtgcattctgtttatatttgttgttttgtcttcctgatggcttatcattataaaatgttcttctttatagctagtaatattttgtttcagtctgtttcgtatgatattagtatatagtcactctagctttcttgtgtttgctgtttgcattatatatattttttctttcgatctagtcgtatctctgaatttaaagtgtagattctgtagatggcaaatagttggatctttttaaaaaaatcgtctcactatctttgtcttttcttttggttgtttagtccattcacatttaatgttattattggtatggtcggatttatgtctgccttattttccccccctctgtgggtctcatgtctttttgtttctgtagtttgtgattattgctttcttttgccttaagtgagtattttctaatgtagcattttaattgccttagtgatttttttcagtatacttttttgagttacctccttagtaacctctataaatgttacaaaccaacaatacattgctaacattaccactatatataattggctttcaaagaaactgaaagaagaaaggagagcaagtacaggttgagcatccaaacatgaagatccaaaatccaaaatgctccaaaatttgagacttcttgatcactgacttgacactcaaaggaaatgctcagtggagcattttggagtttggatttttggatttgggatgctcaactggtaagtataatgcatatattccaagatttaaaaaaatcccaaattgaaaacacgtctggtcctaagcatttcagataagggatattcaacatttctagacatagaactttttttatattacccattttgtttatcttttctgcttctcttcatttgttcctgtgggtttacattaccatctgtaatcgtatccttagcccaatagagctttactttcactcacttcttttgtgctagtattggcacatatatcacatttgtatatgttatagatccaaaaatacatcatatatgtattgttttataccaatgctttttaaatcagatgtgagaagaaaggagaagaaatatgcattaatactatctttggtattacataaaatagaagaagactcaaaagtgctcttttttgtatatattaatttgaattactgtttggggtcacctttggtatttattttaagcctggttttccagcagtgaagtcctctcagcttttatctgggaatgtctttattttgttttcattttcgaaagataactgctggatgtaggattgctggttgacacatttttccccctttcagcattttgaatatgttatctcaccactgtctgactttcattgtttctgctgataagtcagctgttaactttatgagttttctcttgtgattgatgagtcatttttctcttgctgttttcaagatttttctcttgcctttgacttttagcattcctactacgatgtgtctgtttgtggatatctttgtgttgctcctgtttgaaatttgttgagctcccttgatgtataggttattggtttttaataaatttaggaagttttcagccattctttctttgaataattttttctgctcctttctctgtttttcttccagtactcccattacacgtaaattggtgtgcttaatggtttcctgcatttctctgaggcaccatccattgttttctctgttcttcatgttgcataatctctatacatctatcttcaagtttcatattcattcttttgccagagaccatctgttgttaagcccttgtagtgaattgttcatttcaattattttgcttttcaactccagaatttctatttgattcttcttaatagtttatcttcatttataatctttaatgatgtgacattgtcatcagaataatccagaataatccaatcaaattcagacactttagaagggatagttctggagattagtgtttgggatttttagggggagcgcaagaggggtcctccccattgtctcccaggcaaactagatggcctacattttaggctatatctctagtgaatctacctgtgtcttcccaattacctttttaccacatcattcactgtttttgagaatgtccttggacttggacttcaccatgctctgttgcaaataaagtcatttccattggaaagagattaggagctatctgtcttatggcctgtttctctccccagagagaatctctgaaccacggctcaggagttaggggtggggacaatggcatgtttctatctaagtaacacctctgctttaggagctgaatgctgggagaaggtggggaaggaaattaggttatctaggtttgcttctcctggcaagaaaccagccctttatgagccaggacaaggggattgaaaccccagttttagtgtgctacactcaaggtagagcttttgtcccacagttggggcccggagctacaggggagcactacctcccagctgcactcacctggaacttagccttgggaaaaggtagctgggatcaggatattatatggaataggatcaaaattttttctgaaattaagaaagtctttagatatatattcaagagaaaggaaaacatgtgtccagaaaaaaattgtacatgtatgttaattgcagcattattaatagtagccaaaaagtagaatcccatatgttcatcaactgatgagcagataaacgaagtgagttatactatacaatggaataatatttgggaattaaaaagtaatgaaatattaatacatgctatagcatggatgaaccttgaaaacattttggtaagtgaaataagccagtcagaaggccagatattatgagattccttttacatgaaatgtccagaataggcaagtctgtatagacagaaaatagatttgtggttgcctatggctagggtgtgggagtagaaatggagagggtttgtttagtggatatggtttcttttttgggatgatgaaaatgttctaaacttagattgtaatgacagttgcacatgtctgtgaatataacgcaaaacattgtattttggggccgggtgcagtggctcatgcctataatcccagcactttgggaggccaaggcgggtagatcacctgaggtcgggagttcgagaccagcctgaccaacatggagaaaccccgtctctactaaaaatacaaaattagccaggcatggtggcgcatgtctgtaatccagctactcaggaggctgaggcaggagaatttacttgaacccaggaggcacaggttgtggtgagccgagatcatgtcattgcactccagcctgggcaacaagagcgaaactccatctcaaaaatttaaaaaaaataccatttgacccagcaatcccattactgggtatatacccaaaggattataaatcgtgctgctataaagacacatgcacacgtatgtttagtgcagcactattcacaatagcaaagacttggaaccaacccaaatgtccatcaatgatagactggattaagaaaatgtggcacatatacaccatggaatactatgcagccataaaaaatgatgagttcatgtcctttgtagggacatggatgaagctagaaaccatcattctcagcaaactatggcaaggacaaaaaagccaaacaccacatgttctcactcataggtgggagttgaacaatgagaacacttggacacaggaaggggaacatcatacaccggggcctgttgtggtggggggaagtggggagggatagcattaggagatatacctaatgtaaatgatgagttaatgggtgcagcacaccaacatggcacacgtatacatatataacaaacctgcacgttgtgcacatgtaccctagaacttaaagtataataaaagtatatatatataaatttaaaaatttaaaaataaataaaaaataaattgtattttacactttaaatgggtgaattttgtagtctaaattatgtctcagtaaagatgctaaaacaaaagagaacgtttagtcacttttgttatcttttaaattttgtaagacatatctattttgtattaaaatatttatcaagccaaacttgcagagcttttatgatcatacaagtcataagttattttataacctcagtaggaaatcatgtgtatatgtggtgaatatattgtgatctaatgtaatttgcttttcatagacttgtcatagtttttaatcctgtgttatatattgacaagttgttttaattatattgtaaacttactggaagctttggtttttgcgaaacttttaaatttcttgcgttatgaagatgtgcagtttcaaggatttctccccgtctttactcttttttaaaaatgatgctcagaaaatttactaataaagttattaatttctaatatttgtacatcagaaaccattcatttgaaaagcttggctttgtgaatataatagtttaacttattttttcctctctaattagtccctcttataataaagaaaagagcatttctttttttaatctttttttactttttgttttgttttgtttttttgttttttaatttgtgtgtgtgtttttattttttctttttaaagagcatttcttttattggtggtcatcttatgttagatatttataatgactactttgtctccatctggtattttttgtttcttaaaagggcatctcagtaatgcctttatcttttctctctattaattcttaggaaaaaaagcaagataatatttcctcagatttcttctatcatcttagattctcattgaaggttagggtttttttgcccaataaattgtttttaagactaaaaataagcacaaatatcaaaatacgcttttgtctgaatacatatgagacataagaatccattgtttttcaatttttttattttaataagttgtaatactttaaaagccatttaaaagtaaccttcttggagaaagtttactttaaaatgttgaaaaatatttgtacatgactaattaaagcgtattcctaaagcttttttgagaaattgtaaaatttgcttaattttataattttttctagaatgacttgagtagccattattccccaggtagacttgataaatttaaatgtgcataataaattgaattaatagattaaatagatttaaatatgatttagaaaattgtcatgtgatgtactggattattcccccttctttttttcaggaactcttggtgtaataacagaagctacaataaaaatcagaccagtccctgaataccaaaagtatggctcagtagctttccctaattttgaacaaggagtagcctgtttaagagaaattgcaaaacaggtaaaagaaaaaawatatatatatacatacatacatatatgtttatgtatttatatttttcaaattctactacatagttgattktgatatgttacaactaatcttcatttttagttgtattatatttgtggtttttacccagttctatatgaaaaggtagtgttgtacagtcatcctttaagtgcagttactatttctttgagtaagtatattgctatcaaacctatttcttggtctagatggctatatgattgtaagccaaggtaagatagtactttgattggtagcttcagatgactttgccttttattgactgttatgtgtcttaagttatttttgggtaagatattttatgattaattgaagtgatatttaatttaaattgagacatttattgaaattaaaagtaatggctaaatatcaaagaccccaaaatttaaatataggtaattcaacttcatcaattcatagaatgtgctgctactaggctatactttgtttcataatattatctaagctatagcttaaattaaggaatatactatgtgtaataagctaaaaagaatttttattttctcccctccttaaaaaatatattattaagattttttttaagacaagataatgctaagtaattttatttatgtatttagttctgtcagtatggaaatttctacgtctctctcggcatttggtttattgtttaaactacaactgtctatgaataattcttaattcaacttttcccagcagggaggaagtcaagggaatgtactctagcctctctttttttttctttcttcaaactcctgaaattttaatacttctattagctatacccaagtagaatcttgaggacaagggagtttttgatgtgacccatataggtcagcttcctgatatccagagcagtgtggaggaagaatctgttgaggcaaaggaatcatatcgagcaagtagtctatgtttatcttggaatttgtaaggtacagaaatgtaaaatgatgaagagtctctcattttcccatcatctcaagacaaccactattaatgctttaaagaactttaaaatgagaaaaaatatatacattatttactcacatatatatatcattcccagtgctgtttattccatacactcataaagttttactttctaagacactctttctgtctggcagcttcccactttcatgaagtacagctatatgaccacctaattcaccagctgatgtggtaatttttgtaattttcaagtagctgcacttacttgtcagttagattgctagacttagtataggtcctttgatcttgattgctagactactcctgggtagggagaggattcaaaaggaagtagggtcctggaataagcattcttggacttgtggcaagttactttggtagtggtaaggcagaagtgattagtaacagttgaaatccttacattagaggccctaattcactagaactttgggaatacgatattatggttagggagctagagtatatagtattaacaccatgttagctaaaatgacgaggtggcaataatatttaaaacattaaaggattattaagtagaggaggattggagataagtttttggagtaaatagtatttgttatactaaagtaacatctgagcactgagtggtgacattccagtgtgttctggtacttgtttctaaaatattccatcattcraaggcagaggaaaggagtttcaaattaagataccccagatattaagaagtaaaagaacttgcagagccttatggttttgcctatgaattaatacataaaagaacaggaagctagggtgttttttttttttttaaatgaccagaagttcactaattgaaaaataaaacacagatgtttccatatatattttcattaatttcagactgttcttaatgaggagcttttgaaatttcaagtgttttcattttgtattatgatttatccttgtgtaatgattttggattacagtcattgggtgaacatcctaagaattttttaaaatgaataaaaggacaagttttactgatttgtgtaaggatgaaggaaaattccatcccctgcttgtcttaaatagttttattttccctctgtctttgatgagcttcactattccccccacaaaaagtgtggttttttgtttgtttttttaagatggaatcctactctgtctcccaggctggagtgcaatggcgcgatctcgatgcgctgcaacctctgactcccggattcaagcaattctcttgcctcagcctcccgagtagctgggattataggcgaccaccaccaagcccagcagatttttttgtatttttagtgaagatgggattttgccgtgttggccaggctcgtctcgaactcctgacctcaggtgatccgcccgccccggcctcccaaattgctgggattacagtcgtgagccaccatgcccagccacaaaaagtgttattaaagaattgtagttcatgtcatttcttgttcaagtcttgaatgacataattctaattcaccattattgcctctaattttatgaaaaaaaatatgaatgccaaattagatttttcctttctgagacagggtctcactttctcatccaggctggagtgcagtggcacaatcacagctcaacgcagcctctcaatctcctggatgcaggtgatcctaccacctcagcttcctgaatagctgggaccataggcacacaccactatacctggctaatttttttttaaacttttgtagagatgggatctccctgtgttccccaggctggtcttgaactcctggactcaagcgatcctccagtttaggcctcccaaagtgtagagattgctggcatgagccaccatgcccggccccaaattagattttttaaaaaattacagaagttataaaagtagtttggatttgtatttattttcaacaaaagatctcagagaggtcgtgttcagtctgtattgaccaactctgccccttcaataatatctcccctctatagaacacagatttagtacactcataaagcttttgattagatgtgtgcatattttgttttcttgatgctccatctacttttccacactgcaaatacttacatgtaaatctatcttaaatttcattaataagaagtgatgtacaaatgtatcaaaatactaagtttataatttcattacaatggaaatgttgatttccaacatttccgccataaatagttggtgtaatctgatacagtttttattacaattcgatatgcccctgatagaaagtgacacagaagacctacttgtgctattgaaaagcaagtatggaattttccttcatccttgcagaaatcagtgaaacttgtccttttactcatttaaaaaaattcttaggatgttcacccaatgactataatctaaattcactacacaaaactatagtgagccaggtgcggtggctcacatctgtaatcccagcactttaagaagctgaggcaggcagatcacttgagcccaggagtttgagaccagtctgggcaacatggcgaaaccctgtctctataaaaaatacaaaaattagctgggtatggaggcatgtgcctgtaatcctagctactctggaggctgaggtgagaggatccattgagcccaggaggtcgaggctgctgtgagtcgtgatcgtgccactgtacttcagcctgggcaacagagcaagaccctatctcaaaaaacaaacaaaaaaaactgtattagctatatatcttggaacaaaataaagataatgattgatagacagtgctaccatgtggttaaaaaagcaggtcgtaaagaaaggtcctttctagtctatagctatgacagttcagttctatgtacttaataattgacagtttttagaaatacaaatattatggactagaaagtttgtcttacttgaaactgattttaaaagtccagatagataatattctattctcgagcattgctcttaataatggagcaattgctaagagtagttactgggatttggatatctaacagttttggaaacctacatattttacttctattataatgcacatgtagagaggcattaatgtttatcttacctggaaatggataaaaggttttataatggtttagggaaagttgtatattagtttgtagaacatacaagtctcatatgtcaagagtggtacagtatttgctgccttcctttgtaatagtgttttcaggcagaaaaattgaaaaaatcaggttttggaactagtcattgttcaatttgggatttggaatttcagttgatagcaggggaattaagatccattaaagtagatggtacatggcttatgattgtgccaaattcttgattgaataatgaattggttgcttgtaattcttcactgtcattttatagcacttccatctttgcaatattttcagattcaagttgcttttgaaatgggaaactgtaattttggataaatatcttttgggaaagaacatacatgactgttcacaaatagcaaagtgggctatatgtatatatatatatttttttttttttttttttttttttttttttttggagacggagtctcgctctgtcgcccaggcgggactgcggactgcagtggcgcaatctcggctcactgcaagctccgcttcctgggttcacgccattctcctgcctcagcctcccgagtagctgggactacaggcgctcgccaccgcgcccggctaattttttttgtatttttagtagagacggggtttcaccttgttagccaggatggtctcgatctcctgacctcatgatccacccgcctcggcctcccaaagtgctgggattacaggcgtgagccaccgcgcccggccctatatgtatatttttattactattcttactgaaggaaataaattaagcaaccttatactagcattagaaggattctactaaagtctctcatccgatctttgtccatgtgaggaagtatcctctttcaatacttcactgccttgtgagaaactagaaaggaggatttagtggaagattaatgtgattctttctcataagtggcagtccagtataatctcctcctttattcagtagatgggtaaatgatttttaagacgttctcagaaaatacatttcctgctgtagcctatgaagaggaggaaaataatgttttttaatcagcatatcagtgttagatataacgtgttattattctctaaaagagataaataaaattgttagtttggaaataacgatgtctttacaaggttaaaaggaaaaccgagtgttaaaacaagctcagaagcagtttctgaagcttgggttttttttgtttgttttcaataaaaacttargagtagtgccctatggtattttgagaggagcatttattccaacaagaggaaaaactgtatttggtattgattagtactcattcctctcaaaactcttctcagtaaaacctagtttcttcgaactaggtttttagaattatagatgaaaatgcagcttttcttcccactaccttttgacggagggtaatttttccttccttctatcacttttattttaaacaattttaaactgatgaaggtttggggttttttgtttgtttgttttaatgattttagattataatttgggaagacataaattttatgaattgttctgttttaaacttaatttatcttggaggagttcaaataaattagaaggagtcaggtttagcacttaccttataaaacacttaaaacttctttttattcaacagtaattcttgggagtatttattacatagagaaactgaaattattttaaatcattttttttgtgtcatgcgtttttttctctgaagcagagagaataaccctagtcaagtgtttggttaattggatcatttactgtttgatccagcaaaattaagacagttatgagacatgttctctaccagaagccactcagaacaagttattatacctttactaaactgaaaaactataaagttataattaggagactggcattatcttttggtcttttccttaatataagtggagggcaatattcactccctattatgtattattttrttctttaaaaccaagcaacaattgacttgtcaaaataaaaagttcttattgtttatcatacagactcctagctgtaagtcagtatgtcatctctaagatgaccaaccagtaataactgtagccttaaatagtctatcatttcatctgtgataccaactctgacttattagttagaagaagaatttgtctacattttaagtttttatgtccagaaattcacatttaacagattatctttttttacatagccttttttgaacttttttttttttttgagacggattctctctctgtcacccaggctggagtgcagtggtgccatctcagctcactgcaagctccacctcccaggttcatgccattctcctgcctcaggctcctgagtagctgggactacaggcgcccgccaccacgccctgctaattttgtttttgtatttttagtagagacagggtttcaccgtgttagccaggattgtctcgatttcctgaccttgtgatccacctgcctcagcctcccaaagtgctgggatttgaacttttaaattaatcaattttgttgtgtgccttatttgaggtagtgtgctcttagcttgataaccaacataatgcaatggatagtatgcagttatatgtggttcctcacttctagtgaggatgttgcatattatgataattttttgtgcccaaatttttgtrtagcacatggagtttagtattgaagcatttgcttctgatacaacatgagattgatagtctatttccaaggtagtctctaggctcaagaatttgggctgttccagagtctacataggatgtggatttaccctttgaggaaacaaatgttttcaatcaagtataattcattccttagccatggaccagagttacatggctgccattcaatgcttatacttttatagtttatccttatgacattacgttagcagaaacccctcagacatgtgaaatatatgttaatgttgaatttattttgctggtaactagtcttttaagaggtgccttctcaaatatgtctcatctgaattgcaagttctgattttttctgtgacaagtaagagctatgacttagttttagaaaaaccagttttgcagaatattttgatgtttcttttttttttttttttgaaacggagtctcgctctattgcccaggctggagtgcagtggtgcgatctcggctcactgcaagctccgcctcccgggttcatgccattcttctgcctcagcctccccagtagctgggactacaggcgcctgccaccacaccagactaattttttgtatttttagtcgagacaggatttcactgtgttagccaggatggtctcgatctcctgacctcgtgatccgcctgcctcggcctcccaaagtgctgggattacaggcgtgagccaccgcgcctggccaaggaaatatttttaaataaaatgataggattgagaaatatgttgctttttaagttagtgyagagagtactaagtaaataagactaatcagaatagtttttactattcagattatgcaatcaagtaaattcctggttgtagcatccctaaagggaagaaattgccagcaatttgactaagtcagtcttgtatccatgttgtgaagtcatcgtggttatttatttcattattaaagtacaaaaagtatactgatatttctgtattagtccatatcaggtttcatatagtttcagactattaagtataaaatatagttaggtacaagttcgatgatttgagagattctagtaagggtacatttatcgtagcaggaaagaaatcaattatttcattagctcagttttagtaagcaatttctgtctgagtattcttgaattccctgaatttatcattaacccatcattaaaatttgtaaaaatattccctctcaggttagttttgatcgcttaccagcaggggtcactttaactcaaggacctttttccctcctttacaaaatctgtggaatactctcagccctgcattagtaaataacatgggagtgaatttagagctcaaattctcagaacttgtgctgtctctgacttttgaaggcaatcttttgtggtttttttaaacctaccaaattagttttaaagcagtggaaacataacctaatcttaactgtacatatagtaactcaaattgatgttgttttttaagaatagtaacattattttgatctcttgattatagaaccttccatttaattaactgtagtggtaacttttaattatttgaattataagaaatgttttcagctttatatatttagaatgatgtgcagtgatttacaaatatcaattaccaggagatcataaaccaacctagatgctatttttgagtgctttacttatataagcatttagttatgacaataactgaaaaactctactgactttttaaaaatctggtactattgaagtatgagactttaaaaccgttggtttgaattagataatttcaaaaaagtccatgttaaaataatttaatatctaaaattaaaaaaattctttagcttattagttctgttttgatagtgtttgtctgttaccatctactattcctccttgatactaataggaatactggatagctagcttatgtgacttgattatcaagttaaaaatcacactcaatataattgaatattagttgctatatgatacagcagttgcccaggagctttcttgccttttttccagctttttaatttgaaaattttaagcatacagaaaatttgaaagactggtacagtgatcacctgtctatccacttcatatattcaacaataattaagtttttgctctgtttaacatgtacgtgtatatgttttttggaccatttgaaattaagttgcagactttttttttttttttttttttttttttaaagacagagttttgcttttgttgcccaggctggagtgcagtggtgcaatctcggctcactgcaacctccgcctcctaggttcaagtgattctcctgcctcagcctcccaagtagctgggattacaggcatgcaccaccacggctgggtaatactgtatttttagtagagatggggtttcaccatgttggtcaggctggtctcgaactcctgacctctggtgatccacctcctcagcctcccaaaatgctgagattataggtgtgagccgccatacatacccagcctaggttgcagactttacagcacttaacctaaatacatcagcaccgtctcctaaagacggaatagtgttcttctttataactacaataccattttcatgtctaagaaaatcagtagtaattttttttttttgagacagagtctcgctctgtcgcccagcaggctggagtgcagtggttcactgcaacctcttcctcctgggttcaagcaattcccctgtctcagcctcctgagtagctgggactacaggtgtgtgccaccatgtctgactaatttctttttttttttttttttttgtatttttagtagagatggggtttcaccatgttggccaggctggtcttgaactcctgacctcgggcagtctgcctcccttggcttcccaaagtgctgggattacaggtgtgagccactgcgcctggccaatcaacagtaatttgttaatgccatctaatattcattatataagattattccagttatctccaagatatgttttatgaatagtgtttgcaaaccaagatttaatcaagacctgcatattttaattgttttaaagattaaatacccatagaaatttactacactaaatgtaatatactttccttcccccccccccccttttttttcattttgttttgttttgtttttgagacaaggtcttgcactgttgcccaggctggagtgcagtggcacaatcttcgctcactgcaaactctgcttcccaggttcaagtgattctcatgcctcagcctcccaagtagctgggattataggtgtataccaccacgcccagttaatttttgtgtttttagtagagacaagcttttgccatgttggtcaggctggtcttgagctcctgtcctaaagtgatttgcccacctcagcctcacaaagtgctaggattgcaagtgtgagccactgcacccatcccctcccattttctgatatatgtgtacttacgtgaattgttttcattaataatacttgccattgataaaggtgcggtagaatgtggttgttagcaggagatggaatttacaagttgctggtaggaacttaaaatgtttttgttatgaatgacagagtggctgttactgtctcatattttacttatgtgcttaagctagaatatataaatatatatgttatatgtatattctacttatgaagaaaagaaatttggtctaatcaggctttgtatattttattagaagtcaatgtgcccactttatgaaaaacatttcagatttgtaaacgtgaagaaaactgattttcctttagtatttttggaaactggtaacgtttttagaagtatcaacccaactacaaagatactcttatgccaatatttgaaattactcaggtagtacatttctttaacatttttaaactattatacatttaataagactacaaaatagaaaataacatagttttaatgtaatttttgtttggaatatgataaagctgtgtgtgcatgtgtctgtgttttaagtgatttttggaggctgtgtggtttgcctgaaatagtgctcatctaaaagtcagaatgtcttcatcttctacctttactgtggataaaatacagtatagttcataaaatggcataatacttgaggcactggattttagttttagaaacatctttgttctaaaataatccactttggggtctggtatttcttttaggatattctcatatgtctttgccagacattaggcagctttttctgctgataaatttaaaatctgttaacttatgtttgtatttatttatctatatctgtagatttcttctctccaaatattttatagaagtcattgatatttgtcttcataaaagtatatgaaaagttaactttttttcctctgtaaatccttaggaactaagctcttgatctcttaaatatagaaagataatattcacattctacctgtctagcttcttactgtrttaaatttgtatcacttttttttttctttttaaaacagagatgtgctccggcatctattcgcctcatggacaacaagcagtttcagtttggtaagtaaggagtggtaattttaaaatgtcatttagccacagaaatttatgaaacatcagtaggaagagtacggagtgcagaggtagaaagaacgtcagtcttgcctttcaggaagatgtcagtctaatgaagatagacaattayataaatgagtgagggtagcagtgttggagggcctgtgaaagaagactgcactggataccatgggctgcaaatgaaggaattgattcttcttgattttgcttgaggataaagagtcagaaaaggcttttataagagagatgcttgagctaaatcttcaaagktgaatataagtttgcctagatgtctcttcttcttctcaaccagacttcttcacttggcagcaaaaatgtgaaggtgtgaaactcaatgatgtgtgttaggggacttcaaatygttctatgtggctcaaatagagggtggggttagagttgttacatgagataaagttggttgggtgggctagggctttgcaggatagatttggattttgtcttgtcagcagtgggatttctttgaagaataaaatcaatcaactttacatcttagctcattctggcagcattgtgcaggatagattagaagggtacatgcatggaggagagacactaggagatgaaacagctcaagaagcaaagtttgagggctttgagcatggcagcagcaatggagatagagaacggatgatagattttcagaaaatcagtttgctaactggatgtggaaggctaaataaaaggaggagttgaagacaacacctagactgatttgattgggtagattaaataacatagaagaatgggtggtggtcttgggaaaaagatatgataatgggttgtagttatattgtgaaatttactttgggatttaagtttatagaatttaaataccctcaaaacaattcctaaaatcatgagagtgatcgttcagtaataaatactaaaggcaaagataggcaggcttttgtcatgtctaaaagtaagctgagattttaatttagggaagcatggttatagttacatagaaacttaactaaagtcaggttcgtaacatattaagagttttaaaattacattcttctaagttagtcataattgtttatttctttaagtaaattactttcaaaatactatactactgacaaaagtttaagataaatatgttctataagtaatgaaatacttaaatcaagtgaaaaaccacttgtgtgttttggcctgcatttaaagatctaggtcttaaagagagccgtgcatctaattaataagactgtgttattcgtttatatgttattgttgttgtaaacaatgttagacctaggcatttgtaaaattagttatgatttggccatacttatttataattggagtccataacaatttaaagtgaaggtttaaagaaagtcttcctgtcatccctcttccatgttctcattactatacctgaaaacatacttacttgctcccctctagcttgctcctgtctgtggtattataggttctaccttctctagtctttactgtgtctcccctctctctgccctttacttagccaccaaagtgatccttttgaaatacagatctgatcatgctttttggctgtctatataaccttttttatttctcarttttaattgaagcctttacattaatatatcctgccatggcttcatgatcaagcaaaagaggaaataatgcttagcacaacaaaaggtgccccagaccctgcactaaccgtatggctgattggtcggtgtttataccacattggttgttaacaaagcacatgccatattattagttgttaatatttttaatataatctctacttcaggtacaactcttaatacattatattgacattatctaattttagtatattgaaatgatatatatcattgtgtatattgaaataatccaaagatgtcctctataaaccaaagtttctcgaatttagggtatgtttcttagtcatttttctatcacctgcacttatcacgtaataggcatttatatgttgattcaattaatcatcaaattggcaagggggtgaacaaatcctagatggcatagtgctgattacattgtcaatagcacactttataaaattctattcatgactgttcgtcagagtggtatccccactttacaaatgactcaaagactcattattttgactacggtccacaaatcatacgtggtagagctagggatgaacccagatttgtctgactacaaagcccaggagtttttgcactgtctgtaaccactgctttaaaatatagataattaataaatcctgttaaatgacacgattaacattgaaataacagaaaattcactgatcaaactgtccagctagtaaatttggaagtgagtttaatattttaaaaaaccacaatagcagctgggtgcagtgcctcacgcctgtaatcccagcactttgggaggccaaggcaggcggatcacctgaagtcaggagtttgagactagcctggccaacatggtgaaaccctgtctctactaaaaaaaaaaaaaaaaatacaaaaattagctgggcatgttggcgagcacctgtagtcccagctactcgggaggctgaggcaggagaattgcttgaaccggggaggcagaggttgctgtgagccgagatcacaccactactctccagcctgggtgacacagtgagactctgtctcaaaaaaaaaaaaaaaaaacaaacccacaatagctagaatatatttaaaatgtaattatattgttaggcaacatatttaagaaaaagtaaaagataatattatctagttgatactaatgcttgacccacctaaaagtcagtatcacttttacaataatttattcttcaaagctatcatgtcaccttagtatcacagatgtatgtgagtaattctactagcattaatggaaattgtgcatataaatctcgatgagttaagtgaacatttacccttaaggattatttcatatcagagtagtatcatatggagtccgcatgcattgtataaagataagtgaatcttttgtataaagaatagataatttcaacttctgccaagaacacaacatgcacattcaatatataaatgtttatatatgtatttctaattgttgttaatataggatgagttccatttgggaccagaaatgaatgttttgatgatacgttatttctatctttatagatattagaaattgtctcttaaagcgctagttatactaggaagcatctctgatagtttaaaataaaagaaaaaaatccccaagcgtatctcttacttgtgatccaggagctcaaaaagattgctaggttgatctctatctaacctgcagttcagtttgtttctttgttgttgttttttaatgcctcaggtatagcatagatatctaattcttagcctctggttaagacttctattacttggtcttttatgtaacacagtttcctattataatcagcaaaaatgtagtaagtagtattacagattgagattcttataaaaaatggatagaaaaaaactaccagtgatagttttagaaacagctagtttgctctttgcacctattttaaaagaaggaaaggaagggcctacactttaaaaacaaacaaaatccccaaaccttaaaggcttttttaaaaaagaaaactttttatttggagataattttgacttacttaagactgaaattctttataaaaattttgtataaatggtatgacacctttttctgaattgggctgctaacactgaggccagatgcatgactcttaaatgtagcaatcataggagttgagtcgttactactttctgaaaagtgagaaaacagtaaaaggttttcactcaattaagcttaatctgcaggcaaagatgttaatttaacagactttgagactccatttatgttattttggcaattttaactctccgggtgtgattaaggaagcaattgctagttttatgccaagaattctggatgaattaacaattaattaagaaacaaccttaaacttggcattaactccatatttggatagttctgaatagtttctatataattaaaaaaaaaagtaaaaccagccaccatgggtgttcttaatgaaataaaaattaatgaagtaattttattatgtgtaaaccataccgttgaaagaaaacctaaactatgtgtagtattaattacatatagtgatttgacttaaaaaatcaaattgataatgggttttgtaaataaaaagttgtttgtgacatttgaaagaagataaaagtagcaaatattaatataactatatatcgtaatataaatatttatgtaaataacacgggaagattttaaaaattaaagttgtgaaaacttttactttcttttaggattctaagttggagtagcttcttgatcttctgaaaaacatagactaacctattaatataaacttttttctcttcttaggtcatgctcttaaacctcaggtttcctctatytttacatcatttttggacggattaaaaaagttttatattacaaaggtaagaatttttataaaatgctaaaattgtaaatgcttaagatrtctgttttctgctttcttcccacatgcacctattataagggtgtttttccatgttgctatgtacatttcagaattacagtttttcatgttggaataaatattaagtaaatcaggcagtcaatttcagaaaattttatttcttttccagttttgaagcttctaaaaataacactgcatttgaacagttttgttttcataacattttctatagtttaaattttttcctttatggaaggtatccataaagtgaaataagagtgtggattttttttaacctttgattgttgaatttttttcctagagtgttaagccatcttataatacatgtgtgccttcttttccttgcatccttgttattccatgtgggattctttttgttacatttttaatttaccagggggaaaacagtactttcttctagttcatgttttttgaagctccaatgagactgaacgttaacattttttttattttctagatctaatttttgtgtgaattcgttggatatggttatttttgccaggtggtggtggggggtgtgcagcttcatgtttttttcttggtactttgatgtatctttttttgagattggaattattagatgtcctttgtcataaatgttgtaagtaattttttttcccagtcaggcatctccttttttaatagggatttttcttttttggtgtaaaagtttcaaatttttatatcttttcctgtgattatttaatatagtctaagcttagaaaagccttccttcctccagtaatatgatcagggccattttcttcactctctctctcttatactaaatgagaatttaaaaaaaaaaaagtctttattactatttgtatttatttcaattttattatgtgaaaaagatctaaaytaatcttcacctcctgctcctccaattgttaaccggttgtggcagcaccattaattaatctgtgcttctcatacattgatttgctatgcctcatatcttatatacttatctaagaaatagattccattttagtgcatctcagtcttttttaatgagctttttgttcttgaaaaattaaatagatttcattgttgtaggtctatttttccctcttgctattcagaattttccttgttatcaccatcacctattattctagaaaaattttagaaacttttcatcattttaggaagttcattgtgttttttaattagaattggaataaactagtacattaatttggagaaatattgactggtttataatacttagtttatgcatttgggagcatacgtcttactcatctttttttggatgtgttttagatatgtttcctaatatatttctttttaagattgttagatactgtttttgttttatgcataagatcgcctttgaaaactttatttaataagaagttattgttagtatgtagggatgttgttgatttttgcttcccgcccaatatatccagctactttattctatcattctgcagttttttatttgattctttatcatagttattatttcaacaagttatttgttgtatttacataagcaatatgttattatgattaacactgtggcatactttgaaataaagtgtttttttctatgctgaatagctttgctacgttgtaatgacctaaataggtttattaaacattcttagtgattgacatgtaaagttccaaagctcaatttttaagaaatcagtgtatttgagcccagatcagaaggaaaagagcaaaatgtattttgatttattgttttgtaggataagacttatctgtaataataaatttttttttttttgtagtttaaaggatttgacccaaatcagctaagtgtagccacattacygtttgagggggatcgtgagaaggttcttcaacatgaaaaacaagtgtatgatattgctgcaaaatttgggtatggcttcaagttcataatgccaagagaaasagttaaaagctaagattctaatatcaccaagcaattattaaagtactaggcattaatgtctccaaacagactgcatgtctcaaagtagttattaatttcagtttagtgttaaatttgtggtaatttatgatagtaaacttaaaatattgttttggtttacatccagaatttttaggaagttagattgatatgttgctcttgtctaatcatatatatattattattaaacattgtatttttcctagatttttacattaatgtcaatttcatgatatttgttctactagagtaaaatagaaaattcattgtcctcttactctgtggtgataatagtgtatgtataaagcgtgctactagtgtgtttttaaaaggaaattgtgtttaatcgaaggtatttgataaattatctatactgcaccccctgtcacttactgttttgtgctggtataaagaaacagaaaacatttcacatctataaccaactgaataatggtagggtggtttctctctgtcttcttgatggattataagactgattgatgagaactatagtgaaaatgccatttatcaggactatgttttttcctttccttttaaagtacataaactaacagtttctagacactaatcttttcttttttgatttcagggattaaaatatatcatatacattatgcttaatattagttctttgtaaatatttattttcatttctttttcattgttttttaagaaaacaaatgaacacttaatttggacccatgtgttttagaatgccccacttttatgtattttttttcatatctaatattagccctttatttctagggttgtctgaatttagtgttaacgtgcagtattcttaaaggggaaaatagtctaatcttagacttaaattttagttttcttttgcactatttttaagtattgaaaatgtctcacttttaccctattctgaaattggcaaatggaattttaattttttcagtaaaagagaaagtttattcatctttcatcttttctcgatagctgttttgggaattgctgatattttaactaaatcacttaaaaataattgtgctataaaatccatgtaatgaccagatggcttgaatttcaggtcatctcatttttgtttgaatttttgaaatgtacatgttttccttcccagaaggaatttagccctatgtatgtacccgttttttagtttctaagttatagggagtacgtatgtaatttgattaaaggactgttttcttaaaacatatgatgttagtaaggcacaaggacatttaaaacctactctagccttaaatattagagactgaagctttaaaaaattgttcattgtgtatttaaatatttacttggatttcataatttctaagaagggcttgtagggaaatggaagggtgcattttgctttatcatttaaataactgtatatagagttaaatttgcttagtttcacctcagtcgtctctctgctcacacacacctccacatctgtacacacacccacacacagaggaatttcagtttttaggatctatctttataatttcaattaagtatggctagtaactcattactagttagtaatgtgtcacatttcctgttagaatggggtaggatgatgacataatgcttgtttgttgtgcctcataatttttatagggcatgacctatctttttcttgtgcatcactgttgatgtctagttcattctagatacttgatttaataattgttgaatgaatgaatgaaagtgaatactatattttcctgatatcttttattctactttgtttatgcctaattactgtgccacctgtaaaacagtgtattttcatctttaggtatttgtcaatacattttgtcaggatttttttgtttgtttgtttttgtttttgtttgtgttttgagacggagtcttgctctgtcacccaggctggagtgcagtggtgtgatctcagctcactgcaacctctcccgcccaggttcaagtgattgtcctgcctcagcctcctgagtagctgggattacaggctcatgccaccacgcctggctaacttttgtatttttagtagagatggggtttcaccatgttggtcaggctggtctcgaactcctgacctcgtggtccacccgccttggcctcccaaagtgctgggattacaggcattattttgtcagttttaatttgagccaccgactgacatgaatgtcagtaatgccagttttgttttcttatatgtcactatccatttaccaattaaaactataagtgaatcttctttaaaatatggcatccagctgccttcagatactgacacttaggcccaagcactattgctgtacttctagcagttttgcttactcaaacaaaacttgtatcaaatttgtccattaaaaataggttatagtaaatgagactcaatttaaagcaagggtaaagagttaaagattggctccgtttgaggtctcatttttttttttgctgttatttgttccttcttagttataattaatttcttaatgtgctttcattctggctcccttttattagatgtggacatcttctattttaaacaacccagattgttatttggcagattacttagattacttagagccatttcgattttttttttttttttttttgagacaatgtcttgctctgtcactcaggctggagtgcagtgacctgatgatcatggctcactgtagcctcagcctccctgggctcaaaggatccttcctcttcagccgcctgagtagctgggactacaggtgcacgtcaccatgcctggctaatttttgtgtgtatgtgtgtgtgtgttttgtagagatggggttttgccatgttgcccaggctggtctcagactcctggtctcaagcagtactcccaccttggcctcccaaagtgctgggattacaggcatgagccactgcgcctggcctattttaagtttttaatacttggaaatatcttcttttggttttctaccagaagttctagtatcccaccagttttctgtaggcactaattttttgttctaatcactgaagattcaaggatattttacttaggtaaaatgccactcttcccaccctcaatcctcaatcatctctcctgcataacaagacaaaagaaagcaccaccaagtttctttctgctacagttttcatgtgctagtttagctcatgtattttattttgaattggggcattattcatctatccctttttttttatttgtttatgaaactctctactgccttattagctttacattgatttttatgaagtattcccaacaatttagagcatttttatgtgttgtcttagccattttttctctttgcttacccttcactcacaccccaacatagttcaatacctttgaacacatatgacccaacagaacatagtagccacataatgaataatcatactttgattgtttatccatgtttgctagtaatgtattttaacttctccaagagcagagcagaataaacattacctgtcagcactcatgacaggtgttttgacatttaccatagaacttaaggtaatatgttatcattatttttaaagcatgcttaagttgtttaatataattcaacatgagagtgattaggttcaccagatggcccttttatataaaaagattgtctctcattcctctttcattagtctttccagtccttcctcatgagacagctttaaatttgtttaaaaaccttgaattgatgtttgaaatttgtggggacagcaggaagtaggggatcgatgttgctactttaacataaagcagtttgaatctacatgcagtcattttgragtgattacaaaagtcacaatttagaagcatttgatttttaagccctactattctttaatatattgtattttaaggtaattctggctagaatattgacagttctgaaagctaaaaagagaaaagtttcaaaaagttcagtcataagtctatgatttccttgtaaagcccagactgactctacttctttgggcttatgaatttagaaaggacatccaatttcttcctgctttgaattagaaaatgcatgtttctctgtggtttgtctccctggatcctaatgtgaacagatctgtttcctccctactgccagatattagaaatattagaagagggtctaaagaaagatgacttaggactgaaaagtaagactttttgtctcatctcgacataacagaggcaagcctattaaatgtttatacctgttacttctcatcagatacatacttggcattctcttttctcaaatattcccaacacaggtgccttgcaccttttcctactcctcactctcttttcctttccttccaccactaggttcaggatggatgaactgtttctgtttcctaracctgtggtgctttttctctcttggactcagagtctgactctattttatatctacttgagctatgggctaagctgttttcctttamgcacttgccacagcagttttctgacttgttttccttttsttttgaaactttatttggctttctacctccaacctcacatccaactcagaattgtgttttatctcttcttctcactttcagctgcttgaccaaagttttatcttctttgctcattaacattctaatacaaacagtccccttcattttttttattataccccattctcaagtagttctagactagagctgcttatatcaaatctttgccacttcttttggataacaccatctacctatagtggcaagtcaggaaattttgatttagcccatttagcttgaaattatcttacagtatttgtacagaacaagagtacatctacattgtagygtttacttactaccaaattcaacacaacttcagaagaagaaaatatttaattataaggtgttaattgaggygataagataaacaatttttcctttagttgactaaagttaaaattttaatttctgtatgataatggaaaaagcataattaaaaactatttactaaaggtagtggaaaaacagtattcattcattgtcttttaaaataagaataacttttacaaacaagagtacttggactgaattatatatttgtatgggattaattctaactagatcatcaaatacaatttctatggatgaaattttccaattgaaagagatagtttatatgttcatagtagtaagaccttacctgtgttggtcttgtgtttgtttatacattgctttataaaatatttctatgtaagtatgttttgtctctcatttaaatcataaatttcataaaataaacaccacatctaacattccaaatactatgtactcatcttgtattctggaagcttctcagtattggggagttcctagtcgtcacatttcttcaaatatgagtgagacagtaataacatatgaatatatgagtaagaatatgatgagtaaaataagaatacttgtgtgaagattatttcagcttatttgtttctcatagttaattctttctgtgcttttttgagaatacgggtagaagtagttgagtttatgagtcaattttatttcgtggataaaagtttgaaattaagatgaaacagaaatattaaaagtgttttcagatttttgttattcaaacttattctcttgacagctttttgatacatttatgataaatgagattaagataaaaaatttattaacagtttgttctttaattacagtgggttggcagctggagaagataatggacagagaggttatttgctgacctatgttattgcatacattcgagtaagttatatcatatttcccttgccacttaatttatgttgcaaacaatactttttcttactttaagtgaatgcaattgtcttccctattttttaaaattttaagctactgtaatttagcatatcattttacatgaaccttattttagctacaaatcttcagaagcccatttaaaccttctccatatgctcttgaagaagttaaagatgatttaatatgtctttctgctctttaaaagaatggagcctttctctgtttaaaagttgagcataccattcataacattacttggttaaaatcaagctgttttacttagcaacactcttcacttaataatctgttttaatgatgtgtaaatctttaactgtgttgtaaaattttgatatttaacttgaagtagttatttgttcactgatgatgattatagaattaaagaaataattatgtgtacttgaacactcaaatgtttctaattctagattttctacttacgatatactgaaatagtcttattatctcaagtctgttgtatttactgatatgaaattgttcttttgaaattttattttttcaatttagttttgtttttctactttgtaacaaattcaaatttcttaattgctttctgctgttgctggggttacttttttttattttttatttttcctgtttacataatttgaatgatcttactctaaaaggtcattttttcagatatcctattgagaatttggcttccacaaatactcagctttcttgttttaattataaaaatttttggaaatttatacataataaatatacatattttcagggtacgtatgatattttgatagcttcatataatatgtaaagatcaaatcaggattgggatatccatcacctccaaatactaaatttactaatttttctcttggaaattttgaaccttatacacaacaattgttgtaagcttatgtacaacatgtttttctctaaaaaaggctgaattaatatgttctcattttagcaaaaatttaatcccagctaaaatctaaatgttaaattgcagtgaatttgaagcatatagtcctcctcttttgtcccctgcccccacagtgatgatgataagtaaaagtatatttattgcctgttcagcattttagaaattttgactaagagatgtactgatcatgaaaggtaatagatgattgtagatcttgtaaataatatctacaattatcaattgtcaatatcatagtttcttcccatagtaagcattttgaatatacataaaatgttgtttgttaggcattttctctgaggatattggccttttccccataatactgaattcagaattctagaaaatgaaatataactgtaacaagtacagcatagacacaatttggagtatctatcttaatttttaaggttctagttaatgttaaaactgattcaaaagcaagttagggattccgccccccctaccccgggattacatgttttctgtttttataagttttacaatggttaataccattgtctctaaatatatttttactgaataaatgagtgcattagagaaaaacacatgctttagatcagatcagtaatttggggatttttttgttttttttcccaaacacaggtgggttgaaatgactcattttacttgaagtgaaaacttaacatatgttgagttttctgccttataaaattttctttaaaatctctggacttctgtgaagctttctttccaattttgataacaaaacaatattgctctgggtaaagaaattaagtattataagttacttgtaatatgagtattatatcctctatactgtaaaatattttcgtagtagaagtgcctccagatgtttgatctattctgtcacttcagatagctgcactatattactatgttttctaaatttgtttttaaagaaaagttgattttaagaaaaaaatctcctcattctaaacaccttccccctgcccctcacttcttgatcttcctactcctttgatcttgactaattttcgatattggttaatttactatttatgccactaaaattctgttctgtcagtattctctacatgtacacagactgttcctggatagaaactccattcactaaagaaataaatttgagttcttgccctgagtcaggcactctgcctggtgccaaggatacagagaataagacagacaaggttcctttagttacggaggctgcatctcactccagggacaacttttcagtgctcttatgaggtggatagtaaagagtggatgaagttaaatgagaaacatgtgatactaacaatgaatatgaaagactaacagtgttattgattcttctgcatctgttgtagtttcttgatttttctgtttgtgtcttaataggacttggctttggaatactatgtattaggagaatcttttgagacttctgctccttgggacaggtaaaatatactaaagtgcctgatattattcaaatatgcgatatgaattgcttgaagtaatgtttctttttgtgtgaatatgtaagtttaaaacattttatgaagaaacattgagacaaggcagctactttatttaaattaatatattcatcagaatgccgtattttcaartgttttattgggtggagggagttgaagaaaatttgtctgtgatccaaagaacgaaggtattgttgaagtttacattttgaagaatgttattgaatgctcagtgttactatgtggttatacttcgctttgacttaaattcttaagtgattaatattgcttaaatgttctctaaaaagtcctcccaaagtataaaaccagttaactgtcctttataatattatttagtttttgatatttgtatgtgtaaaaatgggaatttaggtggtttataaaggaaatttagtttaggaaattatgtacaatttctgtttttaaatttaagcaaaatgttgatactggagcatattttaggaaatggcccaaataagatagatggaaatagattttagaagggtttctttactggaaatacatacatacagtattggttagtgacttaataaaaactgattaggaaatgcgaaatggtttattaatagacctgtgagttgtattataactcatccagtaataaaaaaaattctcaaagagattgtctatacaatcccttattcaaaatgctcaggaccagaagtgtttgagattttagaatatttgtattatatatttaccagttgagcatcccaaatctggaaatttcactggaaatcactgcagcatttcttttgatcatcatgttggtactcaaaaactctcagatttgggggcatttcacattttgkttttttgcaggatattcaacctgtatatttttatttgtttctagtatactgatattttacttttctttataaaatttataaagtactttaaatctacaatgaagtgtataggacggaacaattccctgtgaatctacttcttagattgcatatcttaatattttggtttcttccaatccctcttttttcccccagaaaactttttacttttctacatgcagtcatcatctactgagttagtacgctggtgttcgtattccatgcattgttagctagtaacccagtttatgttatactatcactcagtcattcacaattttttttattttttaagtcagatttctcaagttgaaatgttattcacaaattttgatgctaaattttaacaaggggaataaatcctttcaataaaaaaattatcaagtcatcagcctttgagtagtagaaatagtttggcagyggctgggcgcggtggctcacgcctataatcccaggactttgggaggccgagacgggcagatcacgaggtcaggagatcgagaccatcctggctaacacggtgaaacctcgtctctactgaaaatacaaaaaattagctgggcctggtggcgggcgtctgtagtcccagctactcggcatgctgaggcaggagagtggtgtgaacccgggaggcggggcttgcagtgagccgagatcatgccactgcactccagcctgggcgacacagcgagactccatctcaaaaaaaaaaaaaaagaagcagtttggcagctattcatagtggtctcaaagatcttttttttagtatgaaattagtttttatttttaactaaaaataaatgcttaacatctttccaaaatcaaaactaaggacgaatacttagaaaaaaaggtggaaacatatttttccttccctggagaaaccagtaaggcagacattttaacggagcttgtttttttccacaggactagtctacgcaacagaatctctctccagccctttttctatgtcagttctgtctacctggcaggaaaaaccaaaagaaaccctgaaacaacccctccccacaaatacaacacaagacaagggacttgaaaagttggggaaaaccttttaacgcgtctaagaccattktagtgtttaattcctctctttgggtatcttagccagtttggcctgctatacagagcaccttagactgggtagcttaaatgttcttagacaagaaacaattatttcttacagctctggaggcttggagtctgagatcaggatgttaacatggttggggttttggtgaaggccttcttcctggttttatagatggccatcttcttagtaatacctgcacctggaggaaagcagagagagagagaaagcaagccctctcatatctttttataaagcactaatcccattaatgcagctccacccacaggacctaatgacccaccttctaataccatctaactggggcttaggatttcaatatatgaattttgagagggatgcaaacattcagtccaaatcaccgggacagtggattagtgcaatgctacctcttaagagttaatgaatttccttgtcatcagttagtactgatgattgacatcttgtttttttattcttccaactgtggaagctaataatgtgcaatttttttttgtttttcatctattctttatatatacttacatatttatttgacacactgataatttctgttttatgcagttacacatttgttttcctttaaaacaatttcttcagccgaagttttaataaataatattaatggaaggcaactacatttttatgtaaaatttacttgttgacaaccatttagcaattttctttttctttcaaacctttaactagctagaggacatgtttgcagtagcccatgggatcacggtcttttaactttcacacattattagattattggctttttcatatataagccacttaagggattaccggtcatactagtttttgtgtattcctaagtgtcccatcctattgtgttccatcccatccctaccacaatggctgcacctgttaggttctcaatgaatattcttcatagattcttatgaatgagcttgggaataatttgagagtacagtctataaaaatagatattttaagggttggagatatacattttttgttgttgttgttgttgttgagatgggatctcgctctgtcacccaggccagagtgcagtgacgcttatcacggctcactgcagccttgactgcctgggctcaaatgattctcccatcttggcctcctagctagctaggatcccaggtgcacgtcaccatgcttggctaattttttttgtttgtagagatgaggtctcattatgttgcccaggctggtcttgaacccctgggctcaagcgatcctcctgcattggccttcgaaagtgctgagattacaggcatgagccactgtgcctagccgatgttacagattttggagacaccagcaagtcttctgattaaaaccaagaaagtggatacaaacacttatagatagtatggagtgaaggaaaaaaaagaaggcctaagaaagaggtccagggaacctcaacatttaaggttacaaacaaaacaaaaggtggcaaagtgtattgaataataatatctagaggatgtagaggtaatccaatgatgtaaaaaaagcccagggaagtttttttcagggaggaaatggtcaagtgttaaatttgctaataagtaagaatttgaaaatatgcagttatgtttctgtcctataaaaggattgatccaagtggactgtgttagcctcttatcaagttctgtgagagaatactttcagaaacctttccctaaaaatcatttactgaaagtgtcccattgtgggttataactgttcagtctggtcctttctccatctccttttcattattcaactatcagtgagggtttagatataaggagctcttaatattttcctgtttactattgtatttaagatgattggatacatttaaktgcrtttaaactgaaatgcagttcacacagtgccataacttgcaaaggactgtaacagcagatgattgtattcttagattttttttagactacttagctgtagcacttaaatttcattttctagagccaacataaagaacttgttccaaagaaaagaacttactacttttataaatttgtaatatacgttaactcttataaatattaaagcttaatagattttatttatatttaaatatttgttttataaggtatatattcaaaataaagacatattaaatatcagtcatctaaatgttttatgagattttttttaaatgtgcatccttgccatgcataagtgatgcatagataacattgataagtcatgtatacctgcaactctcataaattaaagaatttaacttaagaacattgttttataaaattagattttataaaactttcagatagtgtattcataaagataaaaaatgtgacatgctaataagacactaaagccctttttgtatttatattttaatcatatactgtttgttcttattgacaatatggataacttttataaagtatgatctgtttaaatgctactgttttttatcaaagtggttctcatacagtcaagtctgcatcttgagactagagataagccaaccttttgagtttttctggtatcatttcaagtctcatgatgctaaacaaatcaaggtttaaaacacagaatcggtgttattatgtggccaggatatttattggggaataaaatgggactttaatatcaaatagtccagcataacacattaatactttacatcgtttgtcttcagtagatctttgtcaaactggatttcagcttgtgagtaagctatcgaacatttgatataacatcatgattataatttattttgaaagacagtgccttgctctgttgcccaggctggagtgcagtagtgcgatgttggctcactgcaacctcaacctcccaggctcaagcagtcctcctgtctcagcctcccaagtagctgggactacagacatgcaccaccttgcccaactaatttttttgatttttagtagagacaaggtctcactatattgcccaggctagtaacatcatgattattaattgaatcattattattattattattttatttgagacagagtcttgttctgttacccaggctggagtgcagtggcgcaaccatggctcactgtagtcctgccctcctgggctccagcgattctcccacctcagcctcctgagtagctgggactgcaggtgtgtgccaccatgcctggataattttttaatattttgtagagatagggtctcactgttgcccaggctagtctcaaactcctgggctcaagcagtcctctggcctcggcttcctgaagtgctgggataacaggtgtgagccatgcacccagcctgagttatttctaaattaaggaaaacttcttagacatgggtaaagattggtattcatgtaacctagaatcgaattttcattaacatctttatagcttttttaaagctcttaaaatcttataatcaaattgattttgaaatcaggctttcctaagtgtaggaaaccacattcaggagacttgagtgtgttcttgtgactttctgttttccttaagtcaaaaaaagaaaaaactttcttctttttgaagttaggaatggagggctcaatttgagtgatcagggctcttttccattcttgaaaggacaactatgaaagctttagctaagaaaatgwcagacttgaatgatgccagattaaccaacgtttattagcacttgtgtagttctcacttgaaaacttaatattgtattcatttatctttttttagggtggtagatctctgtagaaatgtaaaagaaagaataacaagggaatgcaaagagaagggtgttcagtttgctcctttttctacatgcaggtaagttttaaaaattgttcttatacttcttattctgaaaaaaatgttttttttaatcaagggggggaatataattttccagctgagaaaaagcttcagtctattacatttggccagctttcctaaccttcacttaccaccttgttaggattgtgccactggaattttacagtagtcctgagccttttaggagtaggacacccttctgtgagtaagccttccctgccatctgggtggcatggcagtgaagagccaggtgtctggactcctggaaaaagaagaggactactctactcactgaaactataaattatatagtcaagaaattataaattatatacatactcaacatgactctgaagagtgaaggcagtgttttgttgtttactagtaatttaatctcttcaagctctaatattatcagtaaaatagtggtaatgccatttcttcatgggactgttgtaaaaatgaaatgagaaagcatatgaaaaaactgttaggttctgctgtagtattgttttgacataattacattaagcttgaggtagataatccatactagtattagtaaggaaaatttgtatatttccctttcctttccaatgacaagtcctcattaaggcattcagttgttaagcttacttgctccttatagcatgataatttgcatatatttgttttccaagactagaaatatttctgtattctttaaactgctaattgtatgtgtgtgtgtttttgtttttgtcttttttctatcttttctattgtcttatcttgtactttcctagtactagtgttgtgtttcttagttttccttattgttcccattgggaagagataccctttagaatttgctaaattgcacttctgcaaggtaagaaagtaaaattctaacatgagatctgaggaaagcatctttcttacaccttaaatgttcatttcaatcaaaaggatctccttaaagtagccgtttctgcttctgtgtgggagacactgtccatgtttaacaagccttgcagaaagtactaagtcatctgtatattaacatgttttaagcaagtacactgacgataggatcagagattataaaagctgaaaaagtagattttagagattatttgctgggcattcgagatatctgaasgaaaggcaaagagaggtcttgttctctgtagtaaaaagcttacaatgggattaagctaatgtcgacatagtgggtgtaagaatgtcatgttacttttaatttattttaaatttgggggtatctttaacaatgcaccttttatcttaaagtccttaaaatctaagacaaaaatttttgtgtttatattatcaacccaaactgatgcttcatttttctcttgatagcccagtcttttagcagtcagctctcttttattgtaatcctgaaaacaaatcagacataataatccaaaagctatttgttaccattagattttgaaacattttagatagtcaaatctattcttgtgtagttgagaaatttttattcctttgtttttttgaatggtaacttaacagattttacccttcccccttcttccttctgcccccaagttcctgttcaacatctcttaagaaccccacccccgctgtaacattatgaaactatcgtgataaaccactacctatggaaaatgattaggaagtaaaatattctgccttagggcacattctgtaattacacttaaatctaggttcttcagaatgtattcatgaggcctaagaatcttcattctgtattgtagrtaagtagaattagtatatttagactgaattggccatatgtcatttttattaaatagcagtagctatgttttaagaatggttttcctataaaagcttatgtgttcagtttctgtgaccatcttataaaaccagttagaatatgcaaagcctagttacttgagtggctttgataaataagacttttatggttcttatggctcatacttgattaaactaacatttaattagaatttgatttcagtttagtttggtttgacctgcttagtagtgctaaggagattattccatgttgaatatgtgagatgtattttttaaaccagttttttatcaggtgctatgctcactacctgggtgataggatccatactccaaacctcagcatcacgcaatattcccacttaacaaacgtgtgcatagacccccatatctaaaatcaaagttgaaataacattttacaaagctgttccaaagttatttaaaaataattatggatctatttaaaatcaaggatcctaagaaaaataactcaggtgtagggtacatttattgagttcatttatttcatttttgtccattaaaatgtactttgtacattggaatagaaattccagtccaaacttttctgaagacgttatatgggaagtaattgctagtcattgagtctaatacaaataaagtactccaaaaagtagggagcacaaaaaattttttttaattaaagaataatgtagtgactttgacaaccacgctattacttgtccagatgattttgaaagaggttagtgtttaagtgtcttaaatgatagagttgatctattgtaaaaggtgttagatctaagtcactttctgaaatggacccaaattaaggtattccataaggtgtttttcattatttggacttgtctgagatactaatcaatcaggcccatcaagctttgttatgacttcagtaatctgttcatctactgaaaactgaactgtgtaatacatagatgctggatttgtttgaaagatgataatgctctattaatatttagttacatctatttatgaatgttagtgattctcttatgagtgatatatattttactaatttctgcaagttcgtttcattcatttatccttcacactttatttgaatttggttattcctaatgatagtgcccttggagttaaaatggttctccgttgtttcttaaactttgtatatctggtacttaaaatgtaaatattcaagggatcttttttttatgagggtgaattaacactagaagagaaacacagctggcaaattgacagtagcattgttaaacagttcatttcttctgttctgaggcacctaacatttggcctaaaatgcgattaaaattgtagattagattctatttgtattgtgtagtaaaaagagtatttcctctgcatttgctccttctgttaaattaaattctttgtgggagcctctgtaaattgcatatggagatttgactatgattaccttacctcccttttaaatgctttcctaattgcattttgaaagctcagatatatattatatatatgatttaataatctaacattcttgatatcttttgtatatacacattcaacatgtataaatattgagtcatagtattttaaggctatgtcactgcatttggtacaatcatcctatttgttttccaaaggcttactaattattaatgtaaacttagtgaagatgctatatttcactcagtctgatcatatttggtatttgggcatttctcccatttcttagtttttaattctcatatctcatacttatttcttttaacttcgagggagtttggaaaacttaactgatcaccacgtttcatctggtctgtttagtgactgactttaagtgcagtatacttagttttttaaaaaagaatccctcttgatggagatgggccaattggaaaaacatttacattgcttttaaatttctaattttgggggaggtgtaactagacttaaaaaaaaatagtattgtrcaaatatttcctgtgtaccctttactcatcttcctcaaatgctgatatctcatgtaattatagtatgattatcaaaaccaaaaaattagtgttgtttcaatatgattacctaactcacaaacctttctttatcatttgtcctactgatatctttatctttcataaccttcatacatttgaagaatactggccagttatcttgtaaaacatctctcagtttgagtttgtctgatgttttcttgtgatcaaattcaagttacacatttcagcaagattacctcagaagtgatagtgaagtgctcttcatggtagatcatctcagaagaagcatgatatttattaagtctcattattggtgacattaacttagactacttggttagggtggtacctgccaggtttctccactctacaattactatttttccccattgtatttaaaaaaatatcttatggctgggcacagtggctcacgcctgtaataccagcactttgggaggctgaggtgggtggatcacttgaggtcaggagtttgagaccagcctggccaacatgatgaaaccccgtctctactaaaaatacaaaaaaattagccaggtgtggtggcaggtgcctgtaatcccagcaattcgggaggctgaggtaggagaatcgcttgaacccgggagatggaggttgcagtgagccaagatagtgccactacactccagcctgggcaacaatagcgaaactacatctcaaaagaaaaaaaaacccaaaaaccttatggggagaaactttgagactatgcaaatatcctgtttcttatatcatctcctaatcacatcaatatcccactgttgattcttgattacagcagttataattgtgatacttgtaaatggtgattttctattttaatcattcattttacatttatcaattggaattcactgtaaagaagagctttcctctcctctctttttctgcccgccccccaccccttgccactatctatctgtctgtatatgagtctatcagtagggactcatagacattttattgtctggaatatagccattattgtcattattcactttgttgctcagattttcccagtgtggctattgggagtttctttaagttggcttctgtgtccttttgatctgggaaagtaggtttttgaagaggaagaaaatgggcgcacatacttaggaagagtcagtgattgaggcaaggtgtgaagatatgaggcctagggagaaaggtgagaagatatgaggcctagggagaaagaaaagcaggtctgtgggccacagagggtctgtgttctgtagagttggtgctgagtgaaggtatatctcctcaagctttcacagcagtgatagccgttgctcctttgatattggtttcttcctcaagttctttggtttttcttattcctgatgtcagaattgtagttattttcagctcatttttccctgcttttttcccttaatctttttgttcatctggttcctctactcatggatgtctagctttttttactctcctttgttatctcctggttgatttctcctatatcttagtaatattggcatttgttttacctagaacaatatcttatgtttctttgtcagtctccatttaggtatgcctttccagaacacttttcccaatccgacctatcccaattttcttattctttgtatagactgatttttaagctgcataagctaattgatggtgtctgtctttatgttctctcagcattcttcaatctcgtttgtcattctgtatctttagactatgtcatattttggctatatacagcttagaagagtttcttctagtgcatttaaattatctgtgtagaaaaaaatattattgatatttattttgttgtcatttatttttaaagttatagccagaactgaacagtgtctttgttttggtctcaactgcagtgatttgctttttttctacccagaatctttaagtctgttgagccaggagaatccaaacaaatgatgagttcatagtattgttgccagagtgtgacaggaaaagggtcccaggatgatccagacctcaggagaaggttcttggatctcacacaagaaagaattcagggcaagtccacagtgcaaagtgaaagcaagtttatcagcaaagtaaaggaataaaagaatgactactccatagacagagctgccccaaggtctgctgattgcccatttttatggttgtttcttgatgataagctaaacaaggagtggattattcatgcctcccctttttagaccatatagggtaacttcctgatgttgccttggcatttgtaaactgacatggcactggtgggagtgtaggtgtagcagtgaggatgaccagaggtcactctcctggccatcttggttttggtgggatttagctggcttctttactgcaatctgttttatcagcaaggtctttatgacctgtatcttgtgctgacttcctatctcatcttgtgacttagaatggcttaaccctctgggaatgcagcccagtaggtaggtttcagcctcattttacccagctcctatttaagatgcagttgctctgattcacatgcctgacaagaggacttaatgtactttgaagagattataatttgcccattctctatcaatatggattttttaaataatgaaaattgactttagtcagtgtttgcatgtccatatgtattctatgcatttcatgttcctatcctcagcagtgacggagccaatgaaaggaaccaggtttcttgttttgagtctaattttgcctttttcaaggggcagatgttttgcatcccatctgtttactgtggcagtacaaaatgtagttttcacttgcacatatggagctcattgtgtggtcctttggcaggaaaacacgctcttgaaaagtaatggagttgtactatttgtagtatggaagtgcctcaaattttgtcttatacaagtcacatgaagaacttaattgtgcataaaatttgttaaatagcagaaagagaaaaagttagtgttacttttattgtcaagatatgtatgtttttaagtaattttgttaaatgtcattttgattatgcaatttaaaacaatgaatactcatgcttacctgactatatatatattgttttcacacatgctgctgatagttctcattacttctagataacaaaacaataaaatcagtgaaaatggcatttcatcataaaattctgatacaatgtataaaagtttttgggttatttcccaatagaagttttagtaacatgggacagacatgaaaaagattgaatatgtacctataatattgactaatttggtacttcagtgaaggtaaaattcttgttttgcactgcgtcctcagttcacctgttttggcggacaactctaaagcaagccaatgtgtattccttccatggagtagaggctgggaagaaactgagattatatcttaaactaatcatttgggtcgtcttgactttcagtttctagatgttaaatctgatttcacttaacttaaagcccctgtggggattttgtttgttttttagggtgacrcagacttacgatgcaggtgcttgtatctacttctattttgcctttaactacaggggaattagtgacccactgaccgtatttgaacaaactgaggtaattttgcatacctgcatatagcttttacagctgttgattaatttcaataaattttactgtcaatttatgaattttaagttgagtctctttaatcayacatggtttgcctagctgttagcccttagaaatgaaaagcatatttgtttccctggcttatgtactgaattgtgagtctaaaattaaggtactgtacacctagtctgtgattcttcagttgttacagtacataatagctgattaaattaaataacaattaggaattcattaaattaaataactatataggaatcttagatatcactttcacagcccactcatttccacatggtggttgctgttgaggtcagcagccctaatgcccttggtctgtgttgttgtaatgtcattctagatttgtaatttttttatatgctatagctgtaagtgggtgctttgggttcattagctagcagtttctattactttcttaaagagtgtcaaactgtttatttttataaagctttctcttgataaccaatatttctccttatgagtacgcctaaacagactagagtgtggaggatcctgtaggaagctgaggtttcttaaaaactcaggtgttctactgttttaactgcattgcacacctgctaaagctaatttcagtagcacacttttagacccaaactatagaaagggtttggttggcttcctcctatgcctcctcttttttttttaagcagcttttttgaagtacaattcaagtacagtaagctgtatatatttaatgtgtacagttttgacatatgtatacacctgtgaaaccatcaccccagtcagaataatatcattcccaaaagtctgagtacttttttgtcactttagcctttcactgcttcagtgttgccctctggctacccaaatgtcccttctgtacagtaccacagagtgaaattattccttctttctcagtccaaactgctggtctctaagtgctactgatctcaagtagctattgcttwatttaaagtaatttgttagaggatataaattcttagagcaggggagggcatatgtatgattcattcggaaaaccctaagtaatgagggttttttggagatgaagtctcactctgttgcccaggctggagtgcagtggcgtgatctcggctcactgcaacctctgcctcccgggttcaagcgattctcctgtctcagcctcctgagtagctgggattacttacaggcgtgcaccaccatgcctggctaattttttgtatttttagtagagacagggtttcaccagttggccaggctggtctcaaactcctgacctcaagtgatccacccaccttggcctcccaaagtgctgggattacaagcgtgagctaccgcacacagccgagggttcttatagattactttgcagtgggatgtggtccgtctgtcccacctgggccctctcctaycctggcctaactcctgatagtttatacatacacaactgagtaattttgagaggcccaaggtactatasatattttacctcgtagccattatatattcacgaatcattaggaactgaaggcaattccagtttctgtcatccttttttacagtgctctttagtcattctatattttgttacaagtgtttatcttttcctacctgtgtcctctataaggagcttggttaggaccttacatattagggtaaaacgaggtttttcttttcactcttaggtatccataagactgacaagtaatttatcccaagtcattgacctaagaagtgttctccataaaggcatttatggttgatttctaataggtttaataaagactctaatagctttataactctgatgcccactatatgatattaggcaaataatttaacctatctaagccttattttatctgtgaaatgggagtaattgtagttatttcataaagctatactgaaaataagatactgcaggcaaattacttggaacttttctggtacacttataggaagcagtcagtaaattttagtcactttgttggtataatgagagatgttcgttactaagtagaacctgactctacatttacaactttgcagttattaatattattaacaatttagtgtgctgaatggtcattttgtcttttttccctagaatctcaaagtgatctttagacattgtgactattcactagaaaaaaacttatgaagctaggctacttatttaattgctttttaaacacatttgaccaaaagagaggaaagttaggcttctagtttattatttaacccaggaaacatgtgccttctttgggagttgggtctttttctttcactgcaaaatgaaatctaactagcaacaatttgttgtgttgtttccaaatacaggcagctgctagagaagaaatccttgctaatggagggagcctgtcacatcaccatggaggtattcttttttgggagtagaatttctaatattcttactttaaaaaatattcagttcagtaaaatgctagggagagacatggtatgaataatatgagagtacttgaggtttctttaaagtttctatgtctttgaaatagctgttactgaggtagatagttaggttgtggtagtagccactagaagcttactttgacacgcctgcctagaaatggagcccaggcaaccttctgaggtctcagggacctcatgttatcagagaatagcccagcttgcctgggaggtacttgaccattacagcaaacgtttttaaaggatgatggggaagaaaacctacataaatgtttttcagccactatcggaatgtagctggtcatcagttatataatatattgaagggctgtttgttctgcccacccaaagctcarcaaattaatcaagacaggatatgagaaaaatcttttttcaaggttttaatgctgttttgttattacttagtggtcattttggtaagtatcgagtgttgtcagaatttatcacatcaccaataaaaattattacaatatgtctatctttgttactagcatgcttatgaaaataatgaggcaaccctttaaaacttaaacaatggccattctgttattaaaatggcaatgtttgaggttatccacttgttctgtagaatagaaatttgttcttaatatatccctcaatataatttgatgcctaggaaaatagaaatgtgtagatttttaaatagtttttaggaagcacagtgacaataaccacctaatttaaaaattcaactgctctggactccttatatccttttttttcctgtttaattttcattcatagcacttattattatctaatatgctgtatatttgtactttttaaaattttgtcttcctactgcaaagtgagaatccatgaggacaggaattctagttttgtttgttgctatatggtagcacctagaacagtgcttagccccagtcagccctccatacattgatgcagaatgaatgaaagaattctgttggaaaaggagtggactatggaaggtgtgtgtccatatcatattcttacagcaaggtctggaaaagattgctaatgttgatgaataaagtagctcccaacgtcattgtgtcaatttaatcttttgctatacttttctcttaacccccacaaatgaattcttaacttagccaatagcattgaagataatatgctcctctctcctttttctatttattatcctttcatttgatggtggttctcatgaatgctagcataacaaaaatggaaaagggagggaaatgaatattagaaacctctcaagtggaattaaaagcttccgattactctaaaagtccaaacctaattttggaaatttgaatgaggagttacttaaagatacttagattttagcaccttcctgtaaaattttcagaaagccatatacattattttaaatattttttattctgtttcaaaatgacactgtattaatattcagggaactttaatatatataaatatatcatgaattattcgtttgttttttgtctaaattgattacatgggacagaggaagcgaaatgatttagccataattacttgtttgaagaaaaattaaaactttcccagtgtagccaacaaatttgccctttggtatgtgtcagcagccaatagtttactttctcttttaaaatcaagaaatgtggtttctgtgtttataatggtaaatatgggggagaagtgattctgcaagagggtgagagcagctgaatcatatatataacaaggaaatagaggcttaattgtctttaggtaattggttattagatgagctgtttccttaattgtgggatgatgttctcagtttattcartctttatacagtgtcagaaattctctagaagttggaaatgaccaaatgactgcatgcattacagaggaaaaccaaaccaacagttttttcctcggccagtgactctgcttctttagggtctatgaggaaattcaagtccctctaatagtgtctatttgtaagatgcagaaagtgtaatatggcagaactgctgattttacttattcagatgtaccccagacactgagagcttcttggtaggctctaacagagtctgtgtaaacatacttgaaataatatattcataaagctgtcattacagaaaaaaggaaatatgcacaaatataaaataatagaattaaccaactccagtgcaaatctgtttgaaacctggatttcatttgtgagagctatggtaatagtccattatagtaatcaattcacagaaataaaagttaattaacaaatagttagaaaatgttaatttataagatcatgtttattcaattcttgatcacaaagcaaataatgtaaatagcttcttgtcttttttttttttttttttttgatactgagtctcactttatcacccaggctggagtgcagcggtgcgatctcagctcactgcaaccactgcctcccaggttcaagtgattctcatgcctcagccttctgagtagctgggattacaggcatgcgccacaattcatggctaattcttgtatttttagtagagacgggttttcaccatgttggccaggctggtctcgaactcctgatctcagatgatccgcccacctcagcctcccaaagtgcttgttatattttttgatacaaagtatgcttaataccttttaatgttgtataatctgttttccatattataagtactactggtctactaggcaatatggtttcaaagaatggcagtccttcccgtgaagggccttatagtccagtagaataaaatattataccatttcaaaagctactgacaaaaactgatgggattatattattgctactttaaggtaagagtctgcccttttctttgaagagcattcaaaagatgcctttaataaacatgtaaatgctatagatgctgaaacagtgaagagaaaggggatagaataaaggaaaagaattaacatttataaagctgtgaatatttgcctaggtgttctgcatacttaacctcttttaattctgcttaatgcagtggaatagatattattcctgtctttcacatgaagatgctaaggttctgaatataaagtaactggcccaaaaatcagtaataattgttagtgccagaatttgaatttgaactcaggtcttcctgcctcagtatccttgtcctcttaattaaaagcctaaaatgtctggaatgagtaaaatctaaaaagattgaaaatgacaggctttgagaagagacatgtaattaatttttttttaaatgtatatgggctgggcatgggggctcacacctgtaatcccaacactttgggaggcctaggcgggtggattgcttaagctcaggagttcgagaccagtctgggcaacatggcaaaaccccatctctacaaaaaatacaaaacttagctgggcatggtagcatgtacctgtaatcccagctactcaggaggctgaggtaggaggattgcttgaccctgggaggttgaggttgcagtgagccatgatcacatcattgcactccagcctgggtgacagagcaagtccctgtctcaatcaatcaataaaaggaaaataaatattatacattactatttttattttaaaatataaaatctgtttctttagtgaattaaaattttaatttcctcatcatagatatttttattgttttctcagttctttcccataagtcaattttactttctggttgcttttatacttcctgattgtaggttcctaacrtgtcagcagtatcaggtaatagaacaaatggcggtcatatcatgttacattaaagctatgtgtataagttatgtgcatttttcaggttctaggtttataggccttcttttattgaagactcccaatttggtgaaataatttattttttaggaattattgggttgaagttgaatctagcaacgtttgatggcatattaatttatttagaggttttgcctcatttaaatagaaatcttttatgtctatcctatttcttgtatttttattttctatgtggtcaaaatatgaccgcatggaaacagactctgaaatacctggttttctctagtgcttagaaaaagaaactttgataagtctgaatacaaaacatactttaggtatgctgataaaatgaagatgctttcccttttctattttttttctcttctaaattgctaaatattggagtcttccagggctcagccctcagaccttcatttctctatattcactcatttatttgatgattatctcaagtttcacaatttaaaagaccatctgtatgctaactcccagatatcaaaagataacacctctataccactaccctagttgcaatcactattttctgcagtagcctcctaactggtctttcttccactctgctactgtattctcatttctcttgctgctcgattaatctgttaaaaaaatcaatggtttcttctcacattcagaacaaaatgaaaactccttatcatgaccttcaaggatacattgtatatcactctgtcctcagctttgattactttgtacctctagcagcattggccttcttgctattcctcagacatactaatcccttttcccattcaaggcctttgctgtttgttccctctttttataatgttctttcttttgtcctctccttcagatatttgcatgactcactttctaccattgtttaggtctctaataaaaatgtcaccttcttagagggatcttccctgtcctcttgtgtagtttctgtaatccccatttgaattaaatttattgaggttaatgactttatcttgtttgtcactgtatttctcactccctaaacagtgactggctgctctacatagttcaacatcataaatgctcaatgaatatgttaaatgagtggataagtgcatgcccaaataaatgctcacagaatttgagcagttttgcaaattctcaaatagctctgaatcttgcatattaatccttttttttttttttttttttttttgagatggagtttcactcttgttgcccaggctggagtgcaatggtgtgatctccactcactgcaacctctgcctcccgggttcaagctattctcctgcctcagcctcccgagtagctgggattacaggctcccgccaccacacccagctaattttttgtatttttagtagagacggggtttcaccatgttggccaggctggtcttgaactcctgacctcaggtgatccacctgtctcagcctcccaaagtgctgggattacaggcatgagccaccactcccggccgcatattattcttttatattagaacagcagtagttggctgtggttcacacctgcattccaaacactttgggaggcccaggcagaaagagtgcttgagcccaggagtttgagacagtctgcgcaacatagcaagactctatctctacaaaaactaagaaaaaaaactagctcactgtggtggcacatgcctatagtcctaactacttgggaagctggggcgggaagatggcttgagcccaggaggttaaggttgcagtgagctggcatcgcaccactgcactccagcatgggtgatagagagtaagatcctgtctcttaaaaaaaaagaaaagaaaaaaggcagtagtctcgtagttaatttagcttaacatttggtaactaggcctaaatattgaatagagggtcatatttagtcatagaaagtctcagtttattctctaatatttctgggaaagcatattagcagagtgagttagttattcactggagaagtagggtaaaataatgtgcatttttctgcaactccataccaccaaccatttagtgttcttccataaatgcattaagtatgtaaggtttcattcgaactttttgtcttaaaaccaatataaatttgagtggctgaacaacagaggggaaataatgtaggctatggaatcaaatctatattggattcctggttttgcatttaactgtgtgaccttagggaaataatttctctgacttacactttcctcacctgcaaaatgggaataatggtacctgtctcatatgtttattgcaacacttaacgtgttaatctatgtaaaacatctaaatgccttacatttagtaagtgcttaaaaaacaatagttttgtttgtttgtttgtttgtttttaataatagcaataaacagcaccaggtggcaatctgtttggcactcttgccttaaccattaaagaaaggattacagtgtatttgagaaagatccatacattcaagggatatgattcaacaatagttttaacacttcatttataaactacagttgatctcaccctataggaaagtttcttacaatcagcatgaaagaaaaataaatttccttcacagtattggctatgaaatttgctatcgaagaatgttattttcataatagcttttctgtttataggtaatcatataatttgtatatttcaaatgcctgctgctattcagtataatttcataaagcagaaaccttttcaacataaattttaaataatgtttttagttaccttactaaacttattcaatgctagagcttttgagagatcacttatttttatgtatagaaaagatttttcttgatttgcaccctgaacttaaaactcaagttgaactcatagtagcgtctttatttactgaccttcaggcagtgtcatgacactctcagtaccacttttgagttccagagtaaaagggccaggggttgggagaatattgatgcaatttctcttagagggtttggcctgtaattgtgattaataacagttgctttcactatctggcaacaggctggtttgtctgcctacaatcatgctgtgataaatggagctatgttaactctggttttgtgtatcagagaaaacagatgtagtctggaactggaggctataggaaatataaagcctacttaacttaatcttcatagtgcttgtttttgtaactgatgagctggtcagtttcaatagcaaagtttatgtcagccatgtatttaatttcaatttatgacttaagtttttaagttgttcatttgctaaaatcatacctaagtccttgtcaggragttaaaaaccttgattaagtataaccagccttagtttaaatattgattttttttacctaaccaaaattactccctattataattatagggcagctgctgttacctttttttggtagtcttaccagaatctaatagtattagaaactttaaaagtaaaaggaaactactcaaagaagctgaacaaaaaaatcagtttagggccatttgttaatttgtagtgtgaaacaaaaggcatatagattggaaaggaggaagtataactatccctatttgtaggtgccattattgactatatagaaaatcccaaagaatgtacaaaaacagagtcagcaagatttcaggatacaagatcacacacaaaaatcaattacatttctaaatactaacaattaagcatatagaaaccaaatctaaaatataataccacttgcagttgttccaaagaaaatgaaataggcataaatctagcaaaatatataccgaatttgtattctgaaaattacagaatcttgatgaaagaaatcaaaaaagacctaaataaatgaagagacatacagtattcatggtttggtagaaaactcaacatagtaaaactgtcagttctttccaaattgatctatctgtttagtgcattttctgccaaaatttcagcaagatgtttaaatagatatagaaaatattattctaaaatttatatggtaaggagaaggaactagacagctaaaacaaatttgaaaaaatgaataaagtaaaagcagtcaatctaccttatttcaagacttactatatagttacagtagtcatgactgtgtgttattggaggaggacacatagatcagtggaacagaatagagaacccagaaatagagcacacaaatatgccaagctgagtttgacgaaagtacaaaagcaatctagcggaggaagcatagctttttcaacaaatagtactgggcggagggggcggggggaagaactctgacctaaatctcatacctatacaaaaatttaactcaaaatgaataatgaacttaaaagtaaaacaaaactataaaacctttagaaaaatttaaagaatatcttcaggatctagagccaggcaaagaattcttagaccggacactaaaagtacaatttataaaaaattgataaactggattttatcaaaattagaaacttttgctctatgaaggactctgttaggataaaaagataggttatagagtaggagaaaatatgtgcaaaccttatatccaagaaaagacatatctattatatataaatctcatagctcattagtaaaaagcaaatactttaattagaaaataggcaagagacatgaagaaaaatttcactgaagaagatatacagatggcacataatcacatgaaaaaatgttcaacatcgttagctattagggaaatgaaaattaaagccacaggagatatcactacacacctatcagaatggctaaaataaaaaaatagtgacaatatcaaattctgccaatgatgcagagaaactgaatcactcgtacattgcttgggggaatgtaaagtggtacagccattctggaaaacagtttggcagtttcttatgaaactgaacatgtaatcaccactcaacccagcaaatgcacatgtgagcatttgtaccagagaaatgaaaacttatgttcacataaaaaccttaacataaatattcatagcagctttattcataatagcataatagacccaaactggaaacagcccagatgtccttcagctggtgaatgactgcctacacatactgtggtacatccataccataggaatactactcagcaataaataaaaacaatgaactatcgatacatgcaacaacttggaataactctccagggaattatgttaagtgaataaaatccatcccaaaaggttacatactgcctggttctatttctataacatttttgaaatgacaaaatcttaagagtaaaaaaaagattagtgatttccaaaagttgaggctggagagggtgtgactgtaaacagcgcagggatccttagtttgatagaactgttcttgactatatcagtgtcaatgtcttattcctttgatagctaccagatgagtttagcctttccaacactgaatctttatcagattactataagatagaaaatttgttttgccttttaattttttcagtttctttgactggccttttctaacaaaacgtatatgttgattataatatttttccattgaagcaatgttgtagttagagtgtaagaacatactgtggaaaccaacttaacccacaatttaactgaacattaaactattaatatttcagctgtagcataggttaaacagatttgagagctgacagaaaaatctgtagcaagaagatactgatccctgctccccaccccaccatccccccacccctgtgtgactacaggggccaagcccaagacaaaagggccagggacaacattgtgttggctgtctcttaccacatgctgtacctttagtagcttctagcctcaggtatatcaccaggagagtgagtataggtggcttggataatatcacttagctttggatctctaaagagaactttttctctttgacaattttatgtctataacttaaaaataatatgtttgttaatctgagaatgcctgtattacattattacattgttacagaatacttttatagttagtttcatgtgattagcaaacagttaatcctgggaagaggttggttgtcccctctaacactactttcttacataatccagcagtagtttggtcagattaaattaaatcttgaaatacaaagtcaatgctcagatcactcgtataagcagctaagtctgggttttcttcttaaaatctgacctatagaatagtgctaaagagatatccaggatactcaaactagaactttcaaaatatagttgttataatggttagatgctttttgctttggctgaagtctacttctgagcttcaccttcaatgatcttctaaatgtatggcccatttcataatttgttctttttaataagtctataatctttttgacttataatcaaatgtgtgattcaaaaaattaaaatttagctagagacctctgtgaccagcagacgctggatttatcccttttagattaggactgtttggtagtttctgctaaatcttcaatccgttaagcctcaaagagtagtttcagaaaatttttggtggccagattggcctccatgtccacattttccatgtacatcattttatctcttataccttgcgtacatgtctgttcattcatttatgctgttgatcataccacaacttctttcttgcattctttcttgaatctcttagcatccaggggaatagtgagcctgtaatttgaaaaactgtacttgaaagttttcatattctctgttccaaaagtaaagttttaaaaatgtactatgtgttgtggaagaatacacacaacttgtttgatccagtctctatatacattattagaaattaaattgtaaaacagtgaactccatttttaatttaagcacagccccccaccccccgccccattagttttctttcttttcttttcttttttgtttcttttttttttgtgagctatggagtctcgctctgtcacctgggctagaatgcagtggcatgatctggactcactgcagcctcaaacttctgagctcaagttctccttccgcccaatctcctgagtagctgagactgcagatgcgtgccgccacatccagcttattttttatttttttatttttatttttttagaaatggggtctcactatgttacccaggctggtcttgaactcctgggcttgaacacctcagcctcccaaaatgttgggattacaagcatgagtcactgtgcctggcctagttttctgtaatattcagtatttggcccatcttttttatgtcttataaaatacatctaaatacttaagtacttaaggaatcatatatttagaataatagagaattatggaatgcaaggtacttatcttgttttcagagatggtgatcttggctttttgtagctctagtgttgactctcaggytagatttatacttctagagcatcagaagtcaaaggaatatgttgggtcagtagctatgaatatcccacatcagatgattcaggtctaaaaaagaagaataggctttatgtggtatgtgtacacatgcctttcagtagataactatcacatacaaggtaaattgaaatagttttaggccacctgttatttgctgtcttcagtaattcattttcccttcctttaatatggtgtgctacataagggacagagtataatttcttccctttctgaaaatgagctttacaggtgtttaataaggaactgctatatagttgtatacccatgtgtgttaacatgggtacagatcagtatggtcagctaatttctgaatgccagcagtacaactaagaattatacaaagggcattattagtggtggtgtttagctctggaataaaaatcttgtactttgaagtgtgtttcttctccaagattaaggcctgtggtgtttgttgttttattgatccatgtggggtaactacataaggttctccagaatctcaagaagactccaataattgtcttgttgttaaggcatattgaacgtttttgtttgaatgtgttttctacctgtatatgtatcctgtgaagtagttgacttaaattgttaaacaaagccaaagatttctagtacctttaattgcataaaccaagatttctgaccccatttcaaattctgttatcagtggcagaagaagtgccagacctctgccacgaaggggttaaatgcttttatcaaatgtgtttatgaggggccacagctttgttggccgtactgccctttttttttttctactttctacttcactaatcaaatgtatattagattgattattgtaaaagtataaaccatagaaaatttgacaagatagatgtgtaaattatccttctgacagaagtaatgatgcactccaagcaccttctgttttccagcgcttggtgagtgacttcattaaatatgcaatggctgttgggtggcttctcagacgatggttcagttccttgtggaattgcattattactagaggtgtaaaaccaggcagacaagctagctgttgggcatcctgctgaggttctaatgtgctccatcttgttggagcagttgtttgcagtcttttcaggacaattacatccataaccacaggatacattcagtgaaactgtattacagataacagtggagactggtattcactgctcgtcacccctctctctcttcagctgcctcagtgtgggcagcttatagtagtatggtaaagccccttttaccattcacagagtagttgtttaaaaaaaaaaaaatcctgtggagcaaatctggaaaaaactgatttttaacttttttaaaaagtgcttaaaatcatagaatattagagttgaagagaccttataaagtctaatccatttgcaagtgaaaaaacaggctgaatcatagtcacgggcagtcccttaggagataatagaaggtcctggtagaatatcttttaggtggtagagattgcaggaatagggatttatttactcttagcttctggttttagagctatctcaaacaaaatttttcattttgaatttaaggttttttttctgctgaacttcatttccccccgtcttaataccagcaatacctttttatttctgaaagccaagcagataatttgctttctgagattatcacagtatttattattttgatgacaatttgatggtttcttagagaactggacacaaaagatggttttagttgagctcgaaatggtatttaaggtttccaaaaggcagatgctatgatgtatcactatagcctaataaatgggaatgcattatagaatgacaggctgaatactttaatgaaagaaggtttcccatttcagttggtcaattaaatcactgttgatgactttggatcattaatgaacatttgtagaaaatgaccgtttgaattcaattagtatgataataggttttttggagaagtacaagtacaaataatcctaactgtaaattaaaagatttatccattttgccacagataagttagcatattgcttgctttttaataccagagcaaactgacatttcagaattcttttacagattaagtacatattctttcttacaaaagttctacttacaaaaggttatgtttttcattgagtaccttttgaaatataatttatgctgctaaccattatgttacttcactattctcagaacaaattagcaagacctagaaacaaaaaaagggaactttgtacagtatgtaaaagcaaaagattaagtttacgatggattaggtatttgatttatttaatgccttaggaaaaaaattctaaatctggaaaaacagtaggaagaaagtaaccattatttgggaacatgcaaatttatttaaaagtactgtgaaaagaaaatgtaaatagaagcttaatagccagaattttttcttgagcctattaaagtttcaaattttcttattatttgaagcctttatgttcgttaaaatattttaaggatatatatcctgtcatttttgctgaatttacccaacaaattcatctcaatgtgatgtttttctttagttaacttcattttctctaaaacttgggtgtgttttggtagttaaggcagaggtgggttctttcgaaatgcacgtttttctcattttgttatttgtaaaatgggctataatctctgtccaagcttccttcaatctccatttcatagtttacagagaaaggagacactgtggagcacagacttcccctgggaatacattgggcttaatgagcttgatagtctggtgggctcaataaatcaaataaagcaaaacatttctcatttttgaataaaagcatttatcacacagtgtttgttcactcatggtcacaagattgattggttcccagtatcatagcatatattgaagcatttttkattttgtttttccagtgggcaagttacggaagcaatggctaaaggaaagtatctctgatgtcggctttgggatgctgaagtctgtcaaggaatatgtggaccccaataacatctttggaaacagaaaccttttataaatccattagtaccattacaaaaaaatgtcaattttttttttaagttttcaactgtggttatactagtaatcaaatatatcatggactatattttggatacatttgtttctttggtttaaaataagtttgttttcattctgtagtttgttttgtttctacatctatggattgacagatagtattcctaaatctctctcattgtaggtacatcattttacattcagcggttgtcatttcaaattttagtcaggcagcacaaagctgtcaattattccagaggaagctgctgccagctgttttgtattgttgcttcctcttggggaacaaagacagatttggtatcattgattgctcagctagcctctttttaaaagaacgtttctgggaatcagatgtctagggaaggattccactgaggagtgatacacgtgtacattgtttaagagcatagtctagtgtgagtaggccrttaaggggaaggatattcatgaaagaatttaggcaacctgttatttagaaagccttcacgtctgtaaggtgcttggcctacttttttttttaaattagtatacatgcataaaaccttgtatcatcaatatacaaattattctgttaggggacatgtttttgttctccatgtttctgyttctattgtggtatgagttgtatttgtatcactgagataacctattgttatattctaattcattgataatatgttttgtaagaaaagctgacatccttcattgcaagtgaagaacaggtttaccatgaaatgaatgcctttattcaacttagagtcctaatgtttctgatttcacattcttgttgctgaaatgcagaagaaacagctacagcaagagcrgaaggaaaactcttagacttaatgtctccaattgcaagaattgtttcactaaagaaacagtcatcattcaactactgaatttgaaagcctcagcagtttcaatgacaaaaatcatttttgattttttaaaattaatcccaatggcatgataaattttcatataaaaagtaaagtttcaatttagtttttaataatggtttaatgccttttttgaataactggtttaacctaattttttttaaatgtaatgtattaatgcatataccataatcaaaagtttgaaatatcctgtttcttaaataatgagaacattaatcacatttagcaagcatttgtacattcaaacctggatattaaagtgaaatgattactttgaatcactgtctgccaaggttcatgattcacattttgagatggattcttttcttaatgcaatacctaacttttgataattttttaaaactaatatttgatcagataatgtaagtcaaaatgcagacgatcctttaaaaggatgcattgtctgtgtatgtagcaacagctccaaagtatttttgggcagtttgataccttttatatctgaagtagccttaaccagaaaaatggtaatttaaaattgacaaaatgatatttttaagacttcaaaatgataaataatttttaactattaaaattggcctcaaactaataaatctgtaattaaattagaattaaatatcagtttaacaacaaaatgaaatatttattttttagaagctgcctctcttcattggtcatttatttttaattataaaatttccaacagatctttgctttaagcccttgatatttgacctagttggacacttgatgaggaagttgcctctagaattataaaaatctcagctttataaaatgcatctgttcacgaaggtaatttctttaattggtgatcaaaatataaaattaaagaaggtactaatgtctcactggaagtatatatatatatatatatatatgtatgcgtgtgtgtgtgtgtatatatatatatatatgtatatgtttctgagtaatttttaaaaaataaaacaggttaataagaagatccattcctttgcatgtgattgttataacattctttcccagggagttcaatttcagcaacctcagaaatccatacttgatattaggaaactgtaaatgtaacacctgaaattattatgttcactattctacatgaaccttatggaaattcatgatttatgtctttgtttttctttttccaagtatatgcaggactccccaaccttgattttataatggtgactgcattttgtaggtggaatcatttctaccgaaatcattttgaaacacaagaatattgatcagtactgtttcactctgatttagtaaatcagaaagcctccccctacccccagcccccactttcacataccttctgggaggtgcctcagtatagacttggtatctgtgaaggactgagttcatgaatatgcacagaagcacttaaaccatgcctcttatttctataatatctgaaaatggcttcataaaagttaagtcaggagaacactgtttacatgacacttcttaactcatttttaatgtttatttttaatttcaaaaacttgttgcctatttggttttcagtactgcataacactgactttcttaaattagtcatagttgcaataatttacttaaatttggtaatgtcacatttgggttggggtttcagtgggaatagtaacttgccgctagtgagaaatggcattgaatactaaagactcaatatgaacaggctttatagacccttagagaaactgttgccttaatgtttggtgcaatttctagtagtgcataagtgaatttagtcttatgataagtaactttgagctgtttttagcttagtaagaattgtggaaaccacatgtttattgtgcccatcattttacacaaagaaaagaggattatattatttcttctaaggaagtaggagttttcttcctaaaagtgcttacatattgtagtactattacttaaaagttatttatgaagttgggagccttctagtttgcctgtgttgatgtattttgaaaacaaaattgcaataaaggatgagcttccatcggtgtgtatggtataccagatacagatggttgcaaggaaaccttttcccccactagaatagtctattagtaactgctaagtcctagcttgcatttttgaaaatgcctttctgcatgttagcacccagactttcctttgtcatattcctttatagctacaacttaactgtagcttatcagagaagctctgtagtcctacactgaagtgtgttcccttggctgttcatatggggctgggtttggttgaacttccattctgtataaatgctagaacacagttactacagattgattcacaaactgcatgtgctggtgcttgaggcagccaaaatggaatgctgtggaaagcatatctatatcttaaaaaacactcagacaggagttaaggacagctttaataatttttttgtttaccacttaatctttatcaactttgattttagttagggcttagctcatggttgaagaaaagtggaaaataacaagtgcccatttaggtttgaagaatccagaatgttttacctttgactttatgagttatagaagcttggctttgctctaggyttcatgttcccaaatgagccatctgtcagtatattcacttaattcttactaatttcagtttcctgtaaaggaaacaacttacatattgatgcttaaatccagaaagtgtaaaaggttttcttaaactgttaaaatatagtgtctgatataaaggatgtaagttactcagctttctgctccctaagccaaacagtgtttgtcttcagtgtgaaatttaactgtaaaaactacttgtaatgtcaagagattatagatcatattattaataaaatggacctgggtctaatatttttttttcttcaaagggagtgtgaagctgtttattcttttatttgcatatgagtttttcttttagttttagtttttcatgttcatatttccactgatttgaaaacacaaaatttatttttataattttgttgcttgtagcataatcaagtgcaaaatcaagtgcaacctacttgtgactaaatctctttggatttatagctgaggatattgttagctaggttttgtcaatccctaatcattttttaaaatcaatgctgtattcccaggaggctttgagactcctatgaacctgaagcactcccttttgaaccttggaagatcctcaaagagtgagcactcttgtgctcttctaatcataattaattccttaacaaatcagagtaaggaccactgacatatagaacactcaagccaaagaaccatcacagaatttagtaactttagttctgtgaacatgaaaagatttcttttttggtttccaaaggagattatttatttttccacaaggaaaaacatcttgcagagactctgaattccaaatctgagtgagaaagaaaaggaaaaaaatctgtttcatggtggatttctaagcaacatatatacatgtttttaagacaaccttttgttggcagtgtttttcctgaacaccatatgcaccctaggaaacatgtttttcctttaatcttgttcacatatcagaaaaggacatgaaatgctcatactggcatacaagtttctataagtagttattttttgagctacttatactatatccccaaaagctcacagtgccttgttgggattttttttttccatgaactagccattattttaaatgagtgggagagggtaagtctttagacagaggtcattcagcagttcaagactattcctcttcaagaacatgtcaggaattaagcagttatatgtggaaacactggtaattctttccacagtgttgttttggataatctgttctagtatatttaactaattgtatggtggacctgtactctgatacacatcgaatcagtcaatgggatttgtatgtgcttttccttcctacattttcattcctactgccccaacctagtagccctaagttgtggcttggtgggtttggcattgagcctcaagacactcactacattctttctggatgtttgctcacaggctccctgaggagcagaacctgtggagctggggagtgcgggtggtttctattcctaatattgtgtgtcagtcctttttcgtgtgatggtgccttcagaataacgaatatttctgttctggacaatgattaaatcttatgagaaatatatgtaggttatattaattcttgtccatttttgctaagcctgtgaaatactttggctctgatacaacttaacttgaataatatcttatcctgagtcttcctccaaggcagtacatattcctgccaggactgtagtaatcctttgggaactacatgtgagtaagcacttgtatgtaagccattatactgctgtaactaatgcatacaaacaattcttctctttacatttatagtctaaaaggggatatgcagtgggaaggaaaattcctgagagattccagcatagctttgtcaattccgactgagccatactgttttccacaagggctcaacacatagtcagtattccgtgctttcagtgtgtgttcagattctcctcttactggttttcttagactgtattgttctataagcaaatgcccatgtgtgatttttaagatgtrctggggaaaaataaatcaataccacaaccacccattgttatagaaattgttgtttatttcatattggttctatttaacctttattgacagcatgctatactcggccaaaacaaacaggatacactttgtgcccatgagtaccctctccggtagtgaagggcatgtgcagatactgattttataatggtgattttatatgcagatatatgcagattttaatgcagatactgattttataacatccctgcctgtggctcccacactgaaaggaaggttgtagctgtctgggctctgaaatgactgaaggtcagacctgttgaactctgtcttacatgatacatttcagtaatcactagccacactaagattttagctcttgtattatatagttaagaaaagcaattttctacctggcttatgtaagttcagattgaattaaccctagaaatcatcccatcttatttctatttcatcccatctgaacataattgctacctaacattccccaggctacaagcagataactagtcttcctgaacatttgctgtgaacaaatgcatattcattgcctttccaggaagccttttccaacttctgtaatcttcaagtattaggaggtttttaaattattattagactgaaatctgtgttcctcttctatcccttatacaacttctgccacctttagtcataaagaattgtccaattgctctgttgaagggctgctcttgaggtatttaaagtcaggtctcatgttcctcaacaccttctcctatcaacttttgctcctgtcatttctagactttcaccttcctaatcttcctcacatgtgcccattttacatttttacagtgaggtgtctaggcctgaaaacaaatcttccagagtagtaccaatgcttcctctagtgtagtcactaataaaaaagcatttttggtgggcattgctctgtcaactcatactgaatatatgccatttaccaaagattgtcttttccatgtgacattttggccgcatctccttggaggctaatttttttaaagccccattacttatatttagctttactaaaatttgtatcttactggagttagttccatattttcaaaatgttaggatctagattcttgcccagaatattttctgtgccgtcaagcttcaggtcatcagtaaaattgagacaaatactgtctggattttcatccaagtaatgacagataattggtacattacaagggcctacctgacccatgattctgacatttcatccatgaaagaacattcaggattcagacatctacactttcacttgacatacagttgtccaacttatatttttacattttggccacaaatacgctttttattcagttaatcagcatttatgtcagataaacaagtaatcatgtttacttaacattttctgctgccacagtgaaatcctgataaagctactactacagtttcctgtgctaccctataagaaaaagaaatgaaactttccggccatcacatttccttttgcctatgtttggcctcaggggcgtgtctctctttttgaaagactcaaatccattttctactgcattttctgatgtggtctgttgattgggcctggtattgcctgatggacaagctctgaaatccacccttgcatagttttgccatgtcctttgtacctcattgtgctaacattagatagatgaagctgctcttctttgaaaatggcagaattttaccactgtaaagtaacttagaagataggattctaaatacaagaagcagtggataaggttctattttggacattttgggtgtgattcatttttctcaatgaacttcaagtcactttccctattcatttcttcttttatatagtgaaaaactctgaggtccctttcaactctgtctcagtgattctaatgagtctgtgtttttttgctgaacactaccctagaattgattattatataattaattttttaattcatccttttttgccagacaggcaagaaggtagcattgttatcacaacaaccctgtgaagtaagtgatatcatcccctttttactggtgaaaaaaactgaagtttggttaggttaagaagcacccaccattagtagctgggaagtggcattgcagggctgtggagccaggtgactaactccagtacctgtgtgctggctgcttcactgctgtaggctacttgtgctggatgactatgatgtacacagaatgtatttttaaagtagattattagttgttgtcctctacagaagggcacaagtgttggggtgatcagacccaacaccaggtcatcggggtgatgaagtccagt

SEQ ID NO: 95106 - DNA, 21354 bp, Homo sapiens
tacttttaaaagcatttgtcttcccatgaatgacatcgtatttatctctctatgtgttcaggacattgaattgggtttcctgaccaagcactccctctagccatgccagtgccctgccttcttctgcatatctccaggccattcctatcacacagtaacacaatgttaagtccccatgtattttcttcatggcacttaatttggttatgattttacatctttttatgtgactctttgattactgcctatctcttctactagataggaggggttttatccccatgctatggtttcctaaagaccaagtgtggctcctggcatatactaggagctcaactaaatactgattgaaaggatgaataaacactgatgcactatccgttgaaagaacagaagaaactaagggaggccaggagttcaagaccagcctggccaacatggtgaaaccccatctctactaaaaatacaaaaaagttagctgggcatggtggtaggtgcctgtagtcccagctactcaggagtctgaggcaggagaattgcttgaacccgggaggcggaggtttcagtgagctgagattgtgccactgcactccagcctgggcaacagagtgagactctgtctaaaaaaaaagaagaagaagaaactaagggagtctcctagcccaattcctctacccctggagcatttgcttaagagtggctatgtaatttcccctttctttttataggtagggaagtagatacaggcagactcctcagtaaaactagtaacagagcactaacatccagtagacaagtaccctatgtatgcttgatgaataagagccccaaggtgcctttttcctgtccaattcacttctctgggatacagttcccttgagccattcctaatctgtattctgcataaactcacccctaaatttgcagggcctctagcagagccctaggtaataccacccttaatcatttggatggctcacaggcattagaaagggctctcctgtcaggagcgggatccaaggtactgcctgggaggagctgagggggtcttgcctgaccatcttctccccttggcatccagccttgagtccaggcaggatgcagcgcttactaaatccaggcatttcacatgtcttatcaaatttaattctcacaataatcctatgtgttttcattacctgtatttcatagatgaggaaaagtgagggtttttttttttgacagagtctcgctctgtcgccaggctggagtgcagtggtgtgatctcggctcactgcaacctctgcctcccgggtttaagcaattctcctgcctcagcctcctgagtagctgggactacaggtgaatgctaccacacccagctaatttttgtatttttagtagacacagggcttcaccattttggctaggatggtttcaatctcctgagctcgtgatctgcccatctcagcctcccaaagggctgggattacaggcatgagccaccacgcccggccaactgaggcttttttttagagtgtcttgctctgttgccaaggctggagtgcagtggtgtgatctcggctcactgcaacctctgcctcctgggctcaagtgatcctccacctcagactcccgagtagctgggaccatggttgcacaccaccatgcccagctaatttttaaatttctttgtagagatggggtcttactatgttacccagactgatctcaaactcctgagctcaagtgatcctcctgccttggcctctcaaagtgttgagaatacaggtgtgagccaccacgcctggcccttaactttgtttaaagtgggttttcccaaacaagtgtttttgttttttaagagtgtctggctatgttccctaggctggagtgcagtggctattcacaggcatgattatagcacactacagcctcaaacttctggcctcaagtgagcttcctgcctcagtttccccagtagctgggattacaggtacccaacacaggtgtttagtttttataaagccaactatatattttctttctttgtggttactgccttagaagttgcactcagagcatcttcccttacccaatgattattcgatacttatctatactttgttttaatagtatatttattctagaaataaatgtatatataaattattaagtatattagtatatttttgtaaaagaaaaataactgtgagtgtatgcatgaaataatatagaagtttatgtataaaaatataaattatgggctgggcgaggcggctcacgcctgtaatctcagccctttgggaagccgatgcaggcggatcacctaaggtctggagtttgagaccagcctggttaacatggtgaaaccctgtctctactaaaaattaaaaaaaaaattagccgggcttggtggcgggcgcctataatcccagctactcaggagactgagataggagaatcgcttgaacccagcaggcaaaggttgcagtgcgccgagattgcgccattgcactccagtttgggcaacaagagtgaaacttgtctcaaaaaaaaaagtaaattatgattatctgggtggtaatattatatttgacttctttatttttcatatttccacaatgaatgtaattatttcttaaaaaaacaaaagtaaaatggagtctcattatccagcccaagatatcaatagccatgattcttggtggaagggagtaacctcccccctactccccacacccctcctacacacccaggggtaaatctgcaggtttgacaaggcttaaccacatatgcaatactgagttgtttttcagtctggggatagggtggaatcttaacaatatcattttgtgatgctactaacaaaagaacttaacaaaatcctggctgataaaatatttgtttaaaaacttctgtgaccaaaaacagtgaaagcagggactcaagtggatatttgtatactcatgttcagagcagcattatccacaatacccaaaaggtggaagcaacccaggtgtccatcaacagatgaataaataaacagaatgcagtgtagacatacaatggatatcactcagccttaaaaaggagcaaaattttgacacatgctacaatatccatacctctgtgcccacctcttccaggcacagcccttggtccttgctctatctcccctaaaaacacagggaacatttagaggtttactttatgaacgatattacagctggaaaggatccaaacaagtaaaggggccaactagagatcctgtggtgaattaatggcacagctggaagtatccaactgtggcaacatggatgaaccttgaagcgttacactaagtgaaatacaccagttacagaaagacaaatattgtatgattccacttagacgaggttcctagagcagtcaaattcatagacagaaagtagaatggtggttgccaggggatgggaggaggagggaatgaggagttggcatttggtgggtacagaatttcacttgagctgagtgtagtggcacatgcctgtagtcccagctattcaagaggctgaggtgggaggactacatgagcctaggagttcaaggctgcagtgagctatgatcgtaccccacagcctgggtgacagagcaagaccctgtctctaaaaaaaaaaaaaaaaaaagaatttccgttgagaaagattaaaaagttctgaagatggtggtgatagttgcacaacaatgtgaatgtacttaatgccacagaactgtacacttaaaaatgattaaaatgctaaattctgttatgtatttattaccacaataaaaacaaaaaccactgtcctatgagaaaatgtcctaaatctttagcaaggcataagagatctatcacaatatgtcccaacttatctgtcatctctcttcattttccacaacttcccctcattgctccttgagaaaagggacctttttattctcgcttccatcctggcacctagaatagtacctgacatagttataggtggtttgttctgactgagtgactgctttaacattactaaacattttgttattcctctagtaatcaggcacgtaccttcacaccttcacatagggtccttatatgtgagttgttctttgaatagctatcccctcttcttcactcagcaaacgcctattaattcttttttttttttttttttccagtttttttgagacagggtctcgctctgtcgcccaagctggagtgcactggcatgatctcggctcactgctgcgtctacctcgctggctcaagcgatcctctggcctcagccaccacaagtagctgggactacaggcatgtgccatgatgcacggcttatttatttttttgtctgagacacagtctcactcactctgtcacccaggctggaatgcagtggtgtgatctcagttcactgcaacctccatctcccgggttcaagcgattctcctgcctcagcctccagagtagctggaattacgggtgcgcaccaccacacctggctaatttttttgtatttttagtagcgatggggtggtttcatcatgttggctaggctggtctcgaactcctggcctcaagggatccgcccactcggcctcccaacatgctgggattacaggcgtgaaccaccacatccggccataatttccgtattttttgtagagatgaggtttggccatgttgcccaagctggtctcgaactcctgagctcaaatgatccgcccactttggcctcccagagtgctggaattacgggcgtgagccactgtgcctgaccttattaattctttaggacccagaaacatcatcacttctgttgggtcttcctccaaagagatgtcacttacaccttcactctttcctaccattttatacaagactacaacctctatttaacgcttcttattatttaagtacatgtttttcccaaccactctgagtcctgggacaacatatctttttctttctgttctagtttagagcttggcacatagtaaaagtcttcctaaatgttgcacgaacgagtaaatgattttaatttccacaaactccaggcttccctgattggcccctgcctgtgaacatgagtcaccagttgttatcttgaaagcctcaggaacttcagacgcaattcatcctggctacccagtgggtccagaaaggacccaagtgcacaaaggggccggcatcggccaatcctagggtggggaaaagttaggtatccatgcccctgtgcccacttcttccaggcacagcccttggttcttgctctagctcccctaaagacacagaaaatatttagaagttcacttaacaaaaatattacagctggaaaggacctcagagataacaatggtagtccatccacttcattttatagatgaggaaagtgaggcccaaacaagtaaaggagccgactgaagcgcccgtggtgaattaatggcacagtcggaactagagcccaggcctctctcctctctaaagtctaaaacattcttggatttcagtttcctcttctgtaaaacggggtgaaaattagcctctcaggacagtggtgaggagcaaatgagataatgaatgtaaaagaaattactatattagcaacagaaatcagagcggagcgagatggtgtagaggaatctaaggggtgtccggagacatgtgttccagtcatgtcatctctgtgaacctcagtctcctcatctgcaaatgcaggacctggcccggctgaccgccgagacccttccagctctgccgacccaggccctgaggcccttcccggagggccggaccctgagggaaaaaaacgaaggagcccgtggggaccctcgagttaccgtcctgcagcagcgcagtcttctgggctgtccgcagactctccaaccagcccgtcaccgccatctttcccctgctaagcagcacgcccagccgctgccatggcaaccgttccagagggtcacttccggctgactcggaagctattctggccatttgccctccttccccccttcgtccgctctcattggctctgctggtaagtggtctattcctgcccacccccgggtgactagcttggccagtagtcgaccccacccggggaccgactctgggggttggagagactcttggggccggggtcgggcactccagctttcttctagccccgagctgggattccctggcctgcgccagctgcgtacacggcgagtacaccgcacctgcccgggacttcacccgcagctgcgagactcctccattcccggagggctccccacacctgctgcggccgtgccccatctccccgcagctgcggcgctgagcacccccatgtcgagaggctgagaccaggacaggtgcagggcgttcccactcacccccgaaagtcctcctccttcctctgcgagtctgtgttggaggtagagaaatagtatgtggggtttatgtgcaggtcctccccaggctccgctccatcccctaaagctccatttcctagcccagcatcccatttggtaaagcccttcgaagtgggccgcagcagggctgtgctgaatctttagcgcaacccctctgaggaatggtgtcgtttcctactcctcaaaagtacccccgatggcaccagccttcccctcatttcccgtaatactccaacttcgaaaggctggggagtgtgaagctaggctaaaccactgaagtttaaccgggtttgaagagaccccctcccccgacccgcttccccaaactgggctgctacccccaaagcctggtcaggaaagaccctacctccataggcaaaggggttggagggcctcaattctggatttccacgtgcagcagccctgaccaacgctccaataggccgggatccagccatacttcaatggatcccaggggtatcttgaaggcatttcccaagcggcagaaaattcatgctgatgcatcatcaaaagtacttgcaaagattcctaggagggaagagggagaagaagcagaaggtgagctgacccagtctcagaaccctcgtgtgcttgaacccacagccttcatgtgcttcagccctacgttgtttatgtccagaatcagatattggagctgactctgcctgtccagggcctgcaggtctgtttgtatctaccttgtgctaagcttggtcctgggtcttggacaggctatttgctgtgttaccttcttttctacccgaagacctctatccatcagaaaagactccctgggccctcagggaatgaccagtataatttttgccctgaggactgggacagaaacccccctccattacccaggcttgttgttagttgttttgcagccaaattggcaaataaatggcagaggctttggaggcagggttgtcgggtctgtcagactgtaagggcaagaaacgcgctttgttgaaagaataaatgataaaggattcaaagtatggagagaggctgggcgcggtggctcttgcctgtaatctcagcactttgggaggccgaggcaggcagatcacctgtgctcaggagttcgagaccagcttgggcaacatggcgaaaccctgtctctactaaaaatacaaaaaattagccaggcatggtggcacacgccggtaatcccagctactcgggaggctgaggcatgagaatcgcttgaactcgggagatggaggttgcagtgagccaagaygatgccactgtactccagcctgggcgacagagtgagactgtctccaaacaaaaacaaaacaaaagaaaacaaaacaaacaaacaaaaaacaaagtaagaagggaggaggcattcattaaacaaatatttacaggttacttacaatgtgccagacacttctagattgcaccaaggaacaggacgtatgaaaatccttgtcccttacattcaagtgctggcctgtgagaaaatttgctatatgtagaaggaaagctgtctggatggaagggaaatgcttattttcagggtaggggactgtgaacacgtcattcagatcatgttagaagttatgtcgtggccagggggtggcagataaaaattaaaaagttacaacagtagtcatctggatgttccttccacagagtggctgagctcccttcgggcccatgttgtgcgcactggcattggacgagcccgggcagaactctttgagaagcagattgttcagcatggcggccagctatgccctgcccagggcccaggtgtcactcacattgtggtggatgaaggcatggactatgagcgagccctccgccttctcagactaccccagctgcccccgggtgctcagctggtgaagtcagcctggctgagcttgtgccttcaggagaggaggctggtggatgtagctggattcagcatcttcatccccagtaggtgggctgatcccagtctttttttcaaatgttttctagtagcatcttgagctcttttcttgaattattaaaaataactatcattaattaaaaaattagccaggcatggtggggtgtgcctgtagtcccagctataagaggtttaggtgggaggattgattgagccagggaggttaaggctgcagtgagccttgatcgtaccactgtactccagcctgggtgacagagcaagaccctgtctcaagagaaactccaaaaacctcaaaaaactcgttttcttaattggacacactgggaaaccaagtatttcagagtacagaaggactggggacagatacagggtgagacctttggtgtcttaacctcccatcaccatccccacaggtacttggaccatccacagcccagcaaggcagagcaggatgcttctattcctcctggcacccatgaggccctgcttcagacagccctttctcctcctcctcctcccaccaggcctgtgtctcctccccaaaaggcaaaagaggcaccaaacmcccaagcccaggtcaggagcctcccatccctcagaactcccttcccctaggargcagatcacagaaatggggtgggcctggtggctgttcagaaagtcccaggcccctgagagaggagggctctattgtgaagccatttagctcttcccaacactcatcactgctgcatttatctaggccatatctaacacataccactggggatcctagggctaggcactgcgtggagccaaagggaacgtggcctcacacccaaggagatccaagtctgatgcagaaggccccgcctcattcttaggtctgactagaagaccctccccccgcacaaagaagatgacccccacctttaaggatcccttctcttggagaacaagaatttattgttttcttttcttctctatcccaagcccatctctgatgatgaagccagtgatggggaagaaacccaggttagtgcagctgatctggaagccctcatcagtggccactaccccmcctcccttgagggagattgtgagcctagcccagcccctgctgtcctggataagtgggtctgtgcacagccctcaagccagaaggcgaccaatcacaacctccatatcacagagaagctggaagttctggccaaagcctacagtgttcagggagacaagtggagggccctgggctatgccaaggccatcaatgccctcaagagcttccataagcctgtcacctcgtaccaggtacccaggggctagagtgggaggaggggtctttactggccagtggttagtaaccccagtggggttcaggtacagtggtgaagattttatggggtctaggacttgcacaaaagaaaaaaaaggaaaattgatgaaagcagattggcaaaatcttgatagttgttgaagctgggagatgtacgatacttgggggttatatggatctctctacttttgaattttttaacataattaaaagttttttatttttaattttgtttatttatttatttattcatttatttagcagagatggtgttttgccgtgttacccaggctggtcttgaactcctgggctcaagcaatctaccctcggctcagccctgcaaagtgctgggattacagccatgagcccttgtgtcccgcctaaaaagttgtttaaaagaagtttggactctgaagcctaacagaccagggtttgaactctggttcctgtcattcactaactgtgtgactccagacaagttacttaaactctcaaagcatcagttttctcattagtaaaaaggggctactattaaatgaaatggtccctgtagcacaggacctgacatagagtaagccctcagtaaatgttagctcttgctgttggaatgatgatgatggtggtggtggtggtggtgactaatatcatcattattttctacttcttactgctggtctccatccttctgggaaccaaaagacaaattacccagccctcattctatccaaaattctcatcttcaactacacccaagctttacacagccacacagttgccaagcagccaggctggcttttatgtcagcatctgctagaggagycagcttcctttccactggctctacctcttccatctcctcactcttctttcttgcctctgcctcctcctcctctaggaggcctgcagtatccctgggattgggaagcggatggctgagaaaatcatagagatcctggagagcgggcatttgcggaagctggaccatatcagtgagagcgtgcctgtcttggagctcttctccaacatctggggagctgggaccaagactgcccagatgtggtaccaacaggtcacaccctggctcagcccctacttcagttttgctgtgtctcagagttcctgccccagatgtgtgctgtgctctgccccagatccctatgctgtgctctgatgggaatgcacccacagtatagggagaccatttttcaagcggaccaggactcatatagacccctcagctcccagaacagccttgttgcttggtatccttaagaaggagtagacagggacaagaagtatgtttctcagtctccccagaccagcaagggccttcctgaggaggccaggccttgacactgcgtgtctagagcagtggttcccaatcctggctctgcccacaatcaccagggcagcttggtaaggatgaagatgacaaggtccatcctcagactgatggaatcatgaacgagcatcttaggatagtggcagggctggatgatggcatgtttcccatgctccctgcctttcccaagtcctgctgagtacagaccmaacygcccctaggttggtcctgcctctagccttccctagagtctggggcgatggaagccttgtgtgtgtgctcactcatgcctcttcattggtcctggatccttacagcttcccatctggctgcttttttccagggcttccgaagtctggaagacatccgcagccaggcctccctgacaacccagcaggccatcggcctgaagcattacagtgacttcctggaacgtatgcccagggaggaggctacagagattgagcagacagtaagcaggtgtcccagagcagtgaggacagccaggtcctgctgtaaggtcttgggtcaaagccaagaacccccaactcctcagctggggaggacagcaggcagaggaaactgtggatcaccagaggttgagcacagagcaagttaagactgaagctccaggcccagaggtgggggtggggagctttgggaggaaagagctgtaacaccagccctctagattctggttctcagtagtcaggcctattaggattggattcaattctagactgattggtgttaggattgggttaatgttagggttagattacaggtgaattatatctgtactgaggttagggtgggtcagggcagagggttttaatattttattttatcttttttttttatttcaccaacttctttgagaacctgatgaaaactgtggactgttttctccccaaaatgcacaaatgtgcaaaggtttatgtctttttccagatgtatggaccttctaaagcccacgcaaggctggctcaggatttggggtagagttggtgtaaaagcacagtgtcagtaggatttggtttggggctggaagaaagctccatcaagatggagttaagaccaggcacagtggcttatgcctttaatcccagcacattgggagaacagggtggacagatcatctgagctcaggagctcgagaccagcctggccaacgtggtgaaaccctgtctctataaaacatacaaaaatttccagcctggcaaacatggcgaaaccccgtctctactaaaaatacaaaaaagttaggcgggtgccgtggctcatgcctataatcccagtttcttgggaggctgaggtgggagatttgcttgaacctgggaggcggaggttgcagcgagccaagattgtgccactgcactctagcctgggcaacagagcaagactctgtctgaaaaaaaaaaaaagattgagttaaagttaggctttaattaggcgtaggattttcttaatgttggttgcttttaagttaagatttgtagttgtccaagaaataagatttgggtttggtttagagttgggttagcgattaggttcatgtaaaagctagattagagagacactggactgcatttagggctagatgtatcatttgttcaatgggcattaggattaggagctgcttgtaataggcaagttttgctcactttggtcagggattctgatagagtgggatcccatggagactggcctagtttgattgaaatcagcccccagctccattccaggccacaaggctatgaggccggtatgagatggatggacaggcctctttgtctgcccatcaccaggccttggtgctagtgatgacaccgtcactcagccatggtgtccgggcatggagaatgcctcagtcagtacccagcccattggaacaaaagaggcttcccacctggcctcctgtgcccccatttaagggctccagccataggagttttgatgggattactcacgtggacctcctccttccattctcttgggaggctcaagaagggagtaaggggattagcggagccctcctgtcaggatacttgaggtgtccggggccccagaattytcagtgtcctggggtggaggcaggaggccatctgcatatgaaagaacctcagtgtctcaggggtggaggctaatgggtttatttttcctcagagggacaatccttcagctggcagttgctgtctcagctccctccccaccaagaaaggatgtgggtgttggctcagaactgccccctctttgctttctttcctctcctttcccacaggtgcagctgtatttctgtgctccactttctcctgggcctgggcctggcgcatgctgccagccacctgctcagtcctcaaaccccagctcacatattccaaacctttagctccaaatcagtagatatctggggctgcctagacctggctgagggctttcagcacctggccccttgtcctaagtggagtttcacagacctgggcacgtgggctggggcaggggcagagagagtctgtgtctccctactcttaaagagctccacrgggcaagctcagtgcccactctcagaagcagagccggcaccttctcccgtctctcctcaggcttgcctcctgcacagtgagctttttcttctctcctgtcctagcgaagggaaagaacagcagctcctcagggtggattcccctgggcttgcagcaggcatctggaatgggcataagctgagggtgtgggcccgagtctgggaaggcccttgtrctgctgtgggagaggagctccccacgcacagcccctcacctgtcaccgctctcttycccaggtccagaaagcagcccaggcctttaactcygggctgctgtgtgtggcatgtggttcataccgacggggaaaggcgacctgtggtgatgtcgacgtgctcatcactcacccagatggcyggtcccaccggggtatcttcagccgcctccttgacagtcttcggcaggaaggtataagctccatctctgggtgagcaggttgacagagggcagcacaggtctgggggccccctcagagggagaacctcagaagttccagtcctgaggcaggaagcaggggaacagtgctttgccagcatcccatctctctatcggggccggaatcctctccagggagagatggaacagccccgccacacctatgtggaggtgctcagtgaaccctgcaggccaagtatctcatctgatctttctgtgacactatgggggagatgggaattactatccatgttttacagaaaaggagaagggcccagagagggtagtgtcacccagctaatacctgggcaagccccagcttagacatcaggagagacctgggaggatgggacagcccaggcctggttccctgccctcccagcagtcccctctgttgggccagggttcctcacagatgacttggtgagccaagaggagaatggtcagcaacagaagtacttgggggtgtgccggctcccagggccagggcggcggcaccggcgcctggacatcatcgtggtgccctatagcgagtttgcctgtgccctgctctacttcaccggctctgcacacttcaaccgctccatgcgagccctggccaaaaccaagggcatgagtctgtcagaacatgccctcagcactgctgtggtccggaacacccatggctgcaaggtggggcctggccgagtgctgcccactcccactgagaaggatgtcttcaggctcttaggcctcccctaccgagaacctgctgagcgggactggtgacccatggctgggggtgctgaggagagccgagttggactggctacccctcctggccacccagtactccctccagcctcagctggctgaacctcgccgctccaaccaccagcttcctcagcgagcagggcccagggctctgggcctgaagcaagagccagcccggctcccagtgtctgcccggctcccagtgtctgcccagccctctcccagacaggagcaggctgccaccccttctacctcaccactgcccctcgaagaattttgcaaatggccccttgccccattttaagcaggagcaggtggctggtttgaagccccaggtatcccccttccctgctatgggaaaggccaagctgctgggtggggacagaagctgcaggggagagggaagcagccgtgctgtcaacatcatccggcaccctctggggtaggagaacagccattccacatgtgttccctctatccgtcctgcttccyggkcagctggtggtgctgggaatggggtgccccagccttggtgaggacagtgttgggaggcccaggggcccagtaaagtgcatttgacattgaacctgcctggtgtctgagctgctgcagcctctggctaccttgttccacccaggcagggacgacagagatgggaactgaaaagaggagcccagaaaggctgtgttaactgccctccagacaggactggcctgagtcagctcctaaactcacagcaaggacagcagtggctgtgaccagggagaatgttggagccaggcacccagagctcctatctagtcatcagcatcttctgcaggccctaccttagaccaggctatcaggggacatgagcaaaagtgacaagactcaggaaaccattaggaacaactaaatggtgaccgtgtacacagggatgggcggccagggaaggcttcccggaggaggagagaggcagactggcagggaaattgcctctgagaggagtcagcaggctctgtttggggacaattaaggaacagctttagagaggacactgtgtgctgggagtcaggagcaggctgggctggcagaggactggaagcagagcttggtttgatagagcagacaggagcaggtcccgctggggagtgcgggatgtcttcctgaggctgtttcacagggcagggagacttggtgggggagtggggtcatggaaggagcttcaggcagcccaggtatgaggaggagtgggcacagagtcagaaggagactgtattggaggaggagcctggagaggccccatgctgggagttgggtggtgacgcgtgagggcagctttggctccacagggggatcccaccttgagtgtgctgggtgggctacatttctgttggtaacttgcagagtcccggagccagcctttgtctgcctggtctcgatcatgggatcctagcagcctgggagtaggccccccaactcaagctcatacccctgaagtgtaagtcagggggtcttcccagcactgatcatgttgggaaaggaatcagaagcccacaggacctggagggccctttcgcagctcagcaccaacccaagagatggccaatcaaaagcccagaagccttctagaggggcgagcctctcccctgagagtgtctactgccagggacacatggctgccaagagccacagtgggggcctgggtagataggagaggggctggggaaagcctgggcccccgggtgtgaaggcttgcttttggtcccactctggactggtccctcagtgcctgctgctgtccccagcaagagttggagtcagcagaagtccaaagatgcgtgtctgggtccaaatgtggaagttgcttctctccttttgccgcagcctgctccaggcccaaggaacaggacctccagggctgggggtggagggaaccagtgtgcagcaggccatagagtagctcgcccaagttttcctacacacagggaggtcccagaactgcagggagggatgccgcttacttctttgtctgaaatcagggtctgacctccattcttgacatccctccccatctgccttaactccttcccccaggagactcagaattcagagactgccttgaaaccatgcagactcttggtcccacctcctggccagggcaacacaaagtcgtgggataaagagggagcatgccccacctccagtgacccatctgggtgtcccttcagctgcccagtctgacacagaagcccaggagaagagccactgaggcagaggagctaatggagggatttctgagtcttgagaaaggctgcccagtttggaggtaaaatgaggtgaaatgaggttctctgagtccaagtaagcaaggaatatgaatattgggggttcccaggcactttagcgctgaaccaggttctcgaacaggctttcagcccagtctcccattcatcctgaatggagagagactccatttcagggccctggtggtaactggggtcctgtccagcagctgagcaccccgcacacctaccacccagtcaccacctggcctggagtgggcagagagaccccacaagcctgctccctgctccagcccagttcttcatcactctgtccctgagccagggttgtccttggacaggccacgtgtggcaggcagaataatggtccactgaagatgtccatgtcttaatccctggaacctgtgaatatgtcaccttagttggctagagggactttgcagttgtgatgaagcttaagcattttgagatgaggtgattatgctgagtaatcctgtgggcccagtgtaaacatgagttcttaagagctacagtcagggccgggtgtggtggctgacgcctgtaatcccaacactttgcgaggccaaggcgggttgattgcttgagcctgggagtttgagaccagcctggtcaacatggcaaaaccccatctctaccaaaaaaaaaaaaaaaaaattcaaaagttagctaggcatggccagacctagtggtgcctataatcccagctacttgggaggctgaagtgggaggatcacctgagcctgggaggcagaggtgcagaggttccaatgagctgagattacaccactgcactccagcctgagttgtaacagagtgagaccctgtctcaaaaaaaaaaaaaaaaaaaaaaaaaagctacaatctacaatcaaagagagacttgacgaggaaaggtcagagagatgcgaagtttctggctttgaagatggggaaaggtctccagccaagtgtgagcagcctctaagagtcagagaagccaaggaacagcttctactctagagcctccagaaggatggcagctctgctgatgtctggccttatctcagggagccctgttggattttgagctggtggaactgtgagataatgactgtggtgtttaagccagtaagttggtgtaatttgttaatgtgactgcagaaacccaatagaccgagtgcgtgttgggctctccctgtacaaaggcagagggacagcaagtgtgagcaggccctgctgtgaggtagagggcatcctctgaagtgtgtggggaagggggagcctcacatgagcccagggctgccacatgttcagtctgagcctccctaatttcagtttcttcttgacactgtgcaagatgcaagtccccgctgggctgctctgccccacccctactgagcttggagcttcatcttttcccagggcctggggtggggacctcagtcttgaccttagacctacactaaaaggggagcaagacaggccccggcctttcctcctgggttccagctgctcacaaggcagacgtgggcaccgggaaaggggagcgagacaggccctggcctttcctcctgggttccagctgctcacagggcaggtgtgggcatgggacaggggcttcccaggcatcacctggagtgggcatgacaaggtaggcaagtctagctgtgtcccatcctacagttccaatggctgggaaaggcaaacccaggcccattgtcttgcttctccaggagaatcatggaattactctccctttaaatggaatgggatgcctcttgccaggatggaggactgtggcttggagaagacttgggctccccaaacaggggcgcccctttccaggccctcccctgttatctgagggagtggcctcccatgcaagttactgctgttggggcacctgctgctaccaggcttgcaggccttgatgggctcagccgcaggtgcctttggccctatgtctgctctgcccttagttttccagaactcttgagccactggggagtactgcttctgagctctggaactggggagtcctcagggatgaagtcccaaactggcctgaggctctgttcggcaagacctggtccccacactgcagggaacatccctgaagaaggccccaggcctggagatgaagcaaggccccaggggctgaggggccatgggtaggggcccgaggttgcccctggagggcagtacggaccccagggaaggcaggctactggccgttgcttgagtggagcctcttagcaatggtggcacctttgccctgctggactcagcctggccctgacggagcaggcccagagccccagacacagcgcacctcccccatcctttgctccggttccctcagctgggtggttgttgttgtgtgtgtagtgcccctgcatatgtgtgttcatgttccactgcaggggcatgtgtgtgcctaatgcacattcccggcccctgcgtctgtgctgtatgttcatgattttgtatctgagtgtgtgtgtgctcaaccctgggcatgtgaccgtgtggccctgtctgtttaggtcttggtggaggccctgcgttgttaagggctcaggcaaggccttgggtagaaggaggtggggggtccctggaagtccccagtggtgctggagtccctactgcaggtggagtcctggctgggcccccggaccctgtgtcctcgtgtccatggaggaggccgcagggtgggccgcctgcgtcagccttgagcggccatcaatagcgcgcggttaattaatttgatgggaacagcagggaccgccgtttgcatttagtgaagttccaggaacttccaacctcatcttcataattggcctcataaattgtaagaaagagagagatcagcaaagcgggagggaggaggggctgcccgtccgtccttatttaattttattgctgaaattcatctttttagcctcctccgccggaatcggctctccctgccggatttgcctaatcatgataaattaatattcatttccccgcctcttacccagctcccgcgcttggatggagttggggaggggctccttccagccccctctgctgggccttggtgggagcctgggggaatggggacccctgaagggcagcttgtaggcagaactgaaagtggcacctggggagggtaggaggggcctgggagaaagatgaggagtgaagcaggtggggctggatgattgggactctcagagggcctaggatgctgaagtcaatgccccttgtccagctagggccaggtgggaggggcaggaggagcctgagaaggcccttttggagatgcagaagctgagatcaggactgatgagatggatctgggagaggagcctggaaaccagcttgagtggagaggtaggagggttgttgcccacccaacatggactttgccccaccccactcccaagtacatccagcccaccttgccctgtgcaggctccataatagacccatcatggtctatggggcctcacaggcactgtggtctctggctacagaagcagcctctccacttgcccacagctcagctcagcgggggagctggccgccttatgctgggcacctttgctgtgctgtgtggctgtcaccgatcctgctgtccctagcaaggccctgtgggaggttgggatgggggtgctgctggagggcaacacagtcctgctcttccatggtcagtggggccccccagtcaagggatctgaattccccatcccctgtgtcacagttagtatttgggacctgggaggaattttagatgccatccagcccccttaccccatttataaaagaggaaactgaggcccagagatgggatatgccctggttcaaggtctctcagaggtcaggagggctggacctaggagtaaggcatgcttccacaccaccccagaagctaagtgtgctgggcaggattcaaaggatcacccccagttatctttgcctttggattatctcccgtttgagtgtgggtatgactgtgatgaggtgtcactcatgtggtcatgtcacattatacggcaaaaggacctagtctaatcacatgaactctttaaaagcaaagagctttctctggctggtagcagaagggcagtcagagagatttgaagcaggagaaaggccagagagcatccttgaaaagcagccctggctgacagccagcagggaaacagtcctacagccacaaggaactgaattccaccagcaacaagaatgtgtgtggatgcagcctttcccagagccaccagcgaagagcccaggctggcaacacctggatttcagccttg

SEQ ID NO: 95107 - DNA, 45339 bp, Homo sapiens
aggcccccactttaggccttccaaaccccctaagaccttttaatctgtatttacacagttctcataatcaggcccttggtctattagcccaactcatggcaaactccctccaaccagtggtatattttcaaaacaactagaccccatttataaaacctggcccccttgcttaaacattttggtcacaacagcagcaataattattcctgaggcacaaaatctcatgttttatgaacctcttcaggtattttcttctcacagtctacaagatatgctcagccacaaggtgctcacctccagctcatcctctcgcaggcaagccctactttcaactctccttcaaccctctatatctcttcatagatgctccctgactaaccccgccactctttaccttcaacaccaattttagaccccgaccaacactcatgctctgatctaactggaagttctctatgtatcaccgccttacttgcactcacataaaaggagacccagattggtttatagatgggagcacatcaaaacactctcccctctaagcaggatatgccatcattgaaaggatatcatgatgatacccactctctcccacctagaaagccatagaggctgcccccttgcctttgggcacatcctcccaacaagcagaattagttgccctaataagagcactaactctagcagaaaacacacaagtgaatatatacactgattctaaatatgcctgtaacgttatccattccaatgcccaaattttgagtgagcagggctatctcatagctaagggaacccctatcattaatggaaaactcatccatcatctattaaaggcagctatacttccagaaaaggttgtggttatccattgcaaaggacatcaatcagacaaaagccacattcctttagggaaccatgaggctgactattgggccaaacacgcctcagccaacgacccaattccccaatacttatttcccctcacacaacatatgccctccttttatccagaacaccaaacacaacaaccaatcacagtaggggcagacaatttaaacccccatactggttcatacaaaacaaattagtcctacttgaccctgaaaaaacaatttcttctatgggacattcacaacctcttccacactagccattcccctctacagcatttcttaagttcccatatatacataaccccagacataaaggaacagttaaaagccatttcccatcaatgctctgtttgcaaaaaagcttcaccccacttcaacactagaccctcttcttttctaacccatcaatccaagggacaccttccagaacaggactggcaaattggttttacccacatgcccccagtaaaaagggtttgatttcttttagttctggttgatacctttttggtacgggtcgaggcctttcccacaaccaacaaacgagctcctactctccaaattaataacagaaatcatccccaggttcggggtgcctctttcttttcaatctgataatggccctgaattcatttctcaaattattcaaacacttgcacaagccctacaaatcacctggaagttgcacctcccctctsgacctcaatcttcaggaaaggttgaagaaatgaatggcattctacaaaaacaccctcaccaggtactcacaccaaacacataaagactgggttacacttttgcctttagcccttctaaaaattcgggtgctccaatgtaaacttctaacgctcagcacctttgaactcatgtatgggagaccatttgcccctctgctccacctcagggtcaagccccacctccaccaatccctctcatttcccctcttgtacataccatctgccatttcatttaggaatatgctgacaaatacctgccacaacccatcaccgactcctttaatccctccctacagccaggagactgggttctggtaaaataccccagtcctaccctcaattcctgcttcacacctaagtggaagggaccttaccagatcatccttaccacacccacagcaccgaaactccagggactccccagctggtttcattgtacttctctcaagaaaacagacttcccttcaccacatacccaaacaaccaagtctgaaaccccttcggccttctctcgtgtctcccaggacccacttctcttcgcctcacccaaatccctgaggaaaaggaggagaaatccacataagccgcttatgtctctttctctcccaaactttcatcacttcctaactaaccttgttacagaccttcagtggtgcccttaggaagctcccattatacatcctgatcagctcgttactgctctatgggacctatggcttcaaggaactttccaggactttactcctacccaaataacttttttcgctttttgcttgtttctttcaatataaattccctaatcacatcaacctcatcaatacaaccactcctcactgctctcaaactagaacgctctataaaccttacacaatctctcttgcggcaagctaactcttcctttgctctggaatgctgggtgtgtttatcgctgtcttccttagcttacacagcccttcctacattccttcatgaccttttaacaggaaacacaaccctaatttataaactccaaaaaggagcttccttttttgaaagagctgacactctagtcggtgattatcccacttccagggccgatcaggccaacaaattatttcaaacctaggataactccctacagcgccttaagccccacggccctcccattgaagggcccataactaaacacactcctcctcttataatgagcctcactttgcttttcagcctcggagggaaatttccctgtagggtccttaacatctaacctatgcaaccacactatcattgttaaacacccctctgaccatcaaactaaccaggctaactaccaagtatcacctgaagcgaacggagcatttctgcagctggctcgtttgacagcctttccctcagccaatgcctccagcctaacctgtgctgctcctagtgcccacaattttccttggctcaatatcaatagtgcagcatccgaccgcattaaatctgtaaaaaataactcttcctatacctctagtatagtaggtgtctcccaggcctcctccttgtccacctggagtaatgaaccacaggaaagaacaaacacctcatctttaattcacttattttctgtccatatctctgcttgtatttacaataaaggcttgttctttttgtgtggtctcaacacatatttctttgtctccccatcaaccagaccagaacctgtaccctagtttatctttctccctccattggactagttcctcctaatcaatctttacccgttccatccatccaatatgttaggaagaggagagccatccacgtcattcctttaatggctgccttaggtataacctccgggcttgggttgggagcaggctgattcgccacctgcttaacatacttgaaatctctttcaacagaactgcagagttcattagagcatatggcccaaagccttataagagtccaaggccaactagactccttggctggagtagactccttggctggagtagtcctccaaaatagacaggaattagatgttataacaactgaaagaggggacctctgcctctcattcggtaaaaaatgttgcttctatctcaatcagttgggcctagtaagagacgctgctaaaaaacttaaagaaagggctaaaaagctaagagaataacaagacaaccaaataaattactggtttaaaaacaaagtcctaatatgggtcatcccattcctgggctctctcctaaaaatatgcctaggaataatgttcttaccctgcttaattaacctttttctaagttttttttatttttttgagacggagtcttgctcagtcgcccaggctggagtgcagtggcgagatctcggctcactgcaagctccgcctcctgggttcacaccattctcctgcctcagcctcccaagtagctgggactacaggcacccaccaccatgcctggctattttttttttttttgtatttttagtagagacggggtttcaccatgttagccaggatggtctcggtctcctgacctcgtgacccacgcgccttggcctcccaaagtgctgggattacacgcgtgagccaccgcgcctggccacctttttcaaagatttttaaccagcaggatcatggccatctcacagacaattacccaaaaacatctacagacagcgttactcctacaatcaatctgaaaccaaagaactctctgctcactcccccagcaggaagtagccagaaaaaatgcgctgccccttgtccttttcataactatagagactggattgacagagcaggascattgccatcttggacaaacaccacctttctaagttccccttgattaaaaaaccacctaaatcctaccccaaaacatcagcctaayggctaatgtcagcataaccagaaatattccaaccctaagataaacctctcttcaaccagaaacatgctaaccctgaaatagcctctcctccaatagcctcccctccgaccagagacattccaaccctgcaataaacgttcccccacttccaaaacccttaaatatccttagtctgtaagagagaatgcttagtctgtaagagagagcgctcctgatcgaaattggccagaatcccctctcaggtttattctctgaaataaaccttttaatgttgagccgctttttgtatttatttcctctttctttaacggttacaagcattgttacttgagtgtttctgctgtaatggaggaggcagcatgaatatctcaaacggttgctagtgagaagccacgcagatgagaggcatgaagccttgttgggctccctccatgtcctacagccagagagcgtcagaaatacatctgccccagaatgaactgggctgaaaactctttgcatggagggagaccacataacctggggaacttgggtaaacgatgttggaacggaggtgtaagatttgggtttgtgttagttgatttggggaaacatttatggaaacgggcctttgctccggattggatgtcaggaagaggaggattccatgattggatatcttgatgaagcttatctagacggcaggaggacgagacaaaggctaaacatgtaatggtaaagaagcagcaatcactcttattggccaagacgaggggaatgtggtcacttttgtggcttggacagtgttcctgttttgtctgtgttcacacttgattacacagtggtctgtttttttctcttgatctgtatcacggcctgatgttggtgttttatgaaattgttcacattcaaagagaacacccaggcctagctgtttgtgccagaccaaccccaagtcctggctgcagaaccaggccagctccccgatgtcagtggccgcctttctctttacaggcatggagggggacaccattaaggaggagcccctcttctccgctccccacagacaccagtgggtgcagacaagtcagggaatgcctcctttccctccggcatcttttgaggtttccgtcctgacgcccagggccgctccatccaagcctcggtttctcagtctctaaaacaggccagaaaccaggcacgccgtggtgaaaggacgagccgaagagatggcaagagctccagaaagccttcccaggcatcaggggctgcccttgagctcagacgtttctctctggacagggcttcttggacaggaactcaacgaaacttgacagaaatcggacacccccagccaaggaaaagcaggaggggcccggggttcgccaaggcgggaaacaccgcggggcccagacggcgccgtccgcccggctcgcagtcggggcgcgggaggggcccacgcgcatgcgcaccgccccgcccccagccgccccgcccagcccgcgcgcagccctctggggcggccgggccacgccgcgcgccgattggtggcgtccgggactctccctgcaggtgactgacggcgccggccgcccctgcccgtcgcccgcccgctgctgccgcccgcccggggtgtggagcccggccgctgctcgcgggctgagtgtctgtcgctgctgccgcctccacccagcctccgccatggacctcttcggggacctgccggagcccgagcgctcgccgcgcccggctgccggtaagcggcgttgccgccgggccggccagggaagggagagcaggcgggatgggggcggcctgaggcccggggcggctgaggcggcgcccgcgctgggaggcggcgggcggcgcgggctgcacggggcctgctcctgcctggccaggccccgtccggcccactggcggccctgtcggaggcccggtcgctcgcggagctcggagaggccgctccgccattttcgctacgcaggaaggaaagggccgagccgtcgtggccacggcccctctgcgtggcggtgaaaggcgccggcgcgaccgcgtgggccgacccgagggaccggctctgaacgcccggcggcaccgcgggcccccgcgccccgattccacccgcggcctgggctgccttgcgcgtcgcccgcccgcggcttccgggccgcacttcacccgcgggctgtggaacggccgcgttccgggccggtgcaagttcaggggcttggcgtttttatttgcactggagattgaattaatcaccatcttaatccttcgtgtttttgaagcctggaagacaggatgcctcctctgtcatcctgtgattttgtgataattaacagtagttttttttttttttttctggtccacgggaagttccccctctccttgaagttaaggggtccgctcatctcctaagygctggcccctgccagtgggagtccctgtgggctgtggtttgagctcagcatcctagcagcttgaaacagggcctgtgttaatccctgcgtcctgtgggttacagtctccgggtttcatctgtcaaaacgcgtgaatatttcatatgcaagacttccagcttgatgttgtagtttagggccttattacaaaatttaacttgggggcagaaaacctggaaaacttaagacgttcagatttccaggcccacctcagccccagtaaatccgaatccctgagagtggggtttccgaatctgttactaaatccccaggccaacccagcgggggctggagaccagtggtttgggagctgctgttgtagggtagacggaggtgagtaaggcccagccttcgctttctaagagctgctttctgaagggtactaattacggtaattaaaactggcaaaagttaatgactgtgggaaatgctgaggactcttgaggagggattgtcgggcaccgagagactggggaaggaggcagtgtttgaattgagcttccaaggatgttcaggcttgtgatttgcagtaattctgggcgagaaaacattttattttattttactttttgagacggagtctcactcttgtcgcccaggctggagtgcaatggtgagatctgagctcactgcaacctccgggttcaaacaattctcctgcctaggcctccctactagctgagattacaggcgccgaccaccacacccggctaatttttatatttttagtagagacggggtttcaccatgttgggtagggtggtcttgaactcctgacctcaggtgatccgcccgcctcggcctcccaaattgctgggattacaggtgtgagccaccgtgccctgcccccactgaccgttctgatggtacagagcatctcagtaactggtcctggagtctttgaacttgactcagcmattcattttcaaaataaccacggttttagctgtgggtaaaaattggatttgtgtagcagtcttttttctcttgtcaatggagtataatttctatctgaatatatttgggacagcatttggattcaccagtgtgcgtgtaaacctatgagtcttaaaatctccattgctttttacctgcaattaattaggttctgctcaggagcaggctcccttgactgacaaaaaacctggcaactcagaatctcataggttggcaccttagcagccttttgccagatacagtgggaaaggtacatcctgttgccgttttttccaaactcagtttccaaccttgactgagctgaaagggtggcagagggggtgcatggtgtttaaactgctgaccaccctgagattggattggtcagctgctccccatctgccaggagggcactgacattgtcaacaggtcctgcttggctgagtgtatttttaaaaatagctttaaaacgaagaagatctcagaatttgtagatgattggaagctgagagggataagtactaaaatgagtgacaattgggatccatagttatcattgcaggctgttagctacaaccaacaagatgagatttgacaggttaaaatcgtttgtacaagaacagaatctggtttcacatacttgtgaaaatactgtgatttaaaaaaaaaaaccatactttgaataaatcatattgattgctaaagtgaatggaataatgagtctaaactgtgcatcatgaccctcacacatgatatgtgggtaccacaaatctctaatgcagtgaacaataaaagacctcgttattttcccagagcgcaagaaaagttgttcagaaagtgtaaccagactacttggtttagaatccagctcttcgcttactaactgtgccttctgtggctattcctacatgtgtaaaaaggggtgacacttgccactgttactgtacaaattagtacagtatgtatggtgctgcacatagtgtggggtagaatgtatagtgttttatagatgttagccagggttattatttttgagacagcctcattgtgtcgcccaggctggagtgcagtgacataaacacagctcactgcagtctcgacctccgtgggcacaggtgattcttccayctcagcctccttggtagctgggactacaggtgcgcaccaccacagccagctaatttttgtatgttttgtagagacaaggctttgccatgttgcccaggctgctctcgaactcctggggctcaagtgttctgcccaccttggccctcccagagtgctgggattacagtggtragccactgtgcctggctgagccattaacagttgtttaaaagtggaaaaacgcagtcttaaatgaattatgggaaagcactgagtgtccaaagggagaatactacactgcttatatcacatcaaatgtattaatattttgtttagatctttttatttttgttttaaacgttgcatctaatgttcccacccctaaacctcttaaatgtttataatctagaaaaatacatagaatgcactaaatatttcaggtattttgctaaattagtagttttcatccaagcccttaaaagttttaattgctgaatgaatcaagttttttaaaggagagatgtatatattttacctaaaaaaagtgtttgttcatatcaggcagaaatggaactttcctatgtcatacccataaaagtgccgacctgatgtctttaagattggcagcttatattgacaatccatgtatgtcagttgaaggtgtcatggtttaaaattgcttcgccagtaacttgatttcacttttatagggtggttcttttacttatttggttgctacactagtactttaaaaattgatggtcagttgttgaggaggaaataaaatatttgatggccacaycatcttaaaaatactttaaaaaaattggaggctgggctcgatggcgcatacttgtaatcccagcgctttgggggaacaaggcaggaggatggcttgaggccaggaatttgagaagagcctggcacaacttcgtgagacccctgtctctacgattaaaaaaaaaaaagaagaatatttgaacataaaggttaaggtattagaggaaaacagattgtaaaactacagggttgaacaagaaaaaagtcataaaaaagtgaatttgactatgtaaaaatttaaaatttctgcaggacaaatgatactataaaggcaaaagacaaaccgagaaaataattgcaatatacattactaagggtataagaaaggctcacagaattgatgggaaaaaataaaacccactagaaaaatggtcaaaggatgtatcctcccagttcagaggtaaggaatacaaatggcccatcaacagaaagttgctgaggaactatttaccttttcacccatcagattagcaacagttggtaacattggtgaatgtgtagcgaagtagactttctcataaagtgttttgggagtgaaaattacaactttttggggaacagattttggcttctatcagatttaaactaatatcctttgacgagcagtctagcagattaagcaggaatacatgtatcagattgttgattgtggcgtcacttatcatatgaagaactgggaaaagcttgaacccatcagtaaggatctggtcgaatgagtggagatgcttcccatgtgtggctgttggagaggatgaattagactcgggtgtgttggcctggagcatgccttgatgggttatgtgaacactatatgtggagtattgtgtagagtatgactctgtcttctacaaattaaaatgcatgagtccatgtgcatgagcattaaggaaagtggaaaggatacactaaactcatactgtggttggggggtgtggcggaacctgtccccccttttttctgataatacctctgtggtgtttggaaaacacctggatttattttatagttgaaaaaattgaggtataaaaaacaatttagccaaaatattttaacatccttttttaactttattggatacagcaacctttaacctgaatatgatcaacccaagggtatttttctcagcatagtatataacttccagtagacttagctccaaaatgtagataactgaggaaaaaaaaaagttctagatgagattaactatgattaatggacatttttagtcttgtattcttattagggttctaatatttttaagattaggggaggggcctcttccagatttttaggtcagggtcacactttgtccaatgattgcagcccccaatgctttgaatttcagtttattcaaaatagaatgtaagggcctggagcagtgggtcacatctktaatcccagcactttgggatgctgaggcaggaagattgcttgagtacagtagttcgtgaccaacctgggcaacatagtgagaccccgtctctacaaaaagttaaaaaattagctgggcatggtggtgtatgcctgtagtttcagctactcgggaatctgacgagggaggattgcttgagcccagaaggttggggctgcagtgagctgtgatcacaccactgcactccaacctggctcacagagcgagactcttgtctcaatttaaaaaaaaaaaaatctaaggttttgactaatcagtagtttccttatgtatctatgacctatagatttttttttaaagaatccacatacagacttctaagttagattcttttgatgatgcaaaaattatttccagagattttataaaatctcaggattatcatcataggattgttgtaagggtaaaatgagttgatgtttatgaagtttctggaagggtgcccatgtatggaggcagcatagtacctcactaaaagcayggactgcatggctttgaatccccactccactccttactggctctgtgatcttgaacaggtaattgacctcagtgcctcagttttttcatcggtaaataataatagtacctatctcataagaattaaatgagaagatgtgtggagctcttagaatagtgcctgacaggcaggcagtattatcatttttagaagccattcccagttgtggccagcaaaatgtaggatggtctcattgtgtttaattgaaatacctctcatagtattccagagtgagaaagaaggtgataggcagttctctggggatggggctcagtttggggcaccatctgactgaattgtagccagaggagaggcggccaggctagtattaatactaagctgtaagttgcattgtgaggaatgcttacaagaactgaaaatatatttattacctgggtaaaagaagacttcctcccttgtacagtggcagtggaaagacctgatttagatgggcaagttaattcaaaagttaaaatatgacctggtacaagcggaagggttgtttgctcttcatgttgggctgttacctgtaaatgtcccctcccttgtcctaagacatctggctctgtgacaccactgaatgcagcgtgattgtctggawcatctcatgtggtttttgagtctgtccggagaacgggcgttgtgattgttagacccaatgtttgggcaaaagtgacctacttcgggatattaggaattcttgtaagtggattaatacattgagtaatggttatcctaaatactttttttgggtgctggggacagagtctggttttgtcccccaggctggagtgcagtggcgctatctcagctcaccgcawcctccgcctccyaggttcaagcagttttcctgcttcagcctcccaagtagctggggctacaggcacccgccaccatgcctagctaatttttgtatttctggagagacagggtttcaccatgttggtcaggctcatcttgaactgctgacctcagtcctgaccttgacctcccaaagtgctgggattataggtgtgagccaccacacctggccatactaaatactttttaatggctttcttctgcttcttgtatacttctaatagagtctttatgtcacttgtaagaaaagtgaaagtatttgcaattccttaatttgtttagggtcatcctgaaggattagaatacattttcccatttgtattagggatataaagcaaaatagttattttttgttaactcaggaatttcttgtgtattttaggtacttctgacgcaaagaccccgggagaaatttcattcccttaagtttataaatttttaattaaagcttttgtttttaaaagaagaaagttgatacccagctcatttctaaatggaggcaaaaagatgatagggatgaccctcttgggrgatataaatttatttgtttagttgaattggtgtttggcctggcacaatagctcatacctgtaatcccagcactttgggaggctgaggcgggtggaccacttgaggccaggagtttgagaccaacctggccaacatggtgaaaccccgtctctactaaaaatacaaaaattagaccagrcatggtggctcacccctgtaatcccagcgctttgggaggctgaggcaggcagaacacttgaggtcaggagttcaagactagcctggtcaatatggtgagaccatgtctctactaaaaatacaaaaattatttgggcatggtggtgtgcgcctgtgatctcacctactcaggaggctggggcaggagaatagcttgaacccgggaggtggaggcagtgagcgaagatcacattactgcactccagcctgggcaacagagtgagactcagtctcaaaaaaaaaaaaaaaaaaaaaaaagtgaattggtttttmagtgagtacttttttttttttttttttttttttgtgacagagtctcactgtgttgcctaggctggagtgcagtggcccaatcatggctcactgaagccttggcctccctgggctcaggtgatcctcccacctcagcctactgagtagcttggactacaggcgcctgccaccacacctggctaatttttgtatttttttcatagacatttttttgccatgttgtccaggctggtctcgaactccgggactcaagcaatcctcccacctcagcctaccgaagtgctgggtttataggcatgagccactgcgcctggcgtaaatgagcacgtttttatacttgaactctgaggagcaagaggtgggatagagctggtgtgtttggttggtgtgttgaactttgcaggaggtgaacgtgtatactttcaacttggattcttgtgtgccagttcagatatctaatagcttaaacagaatttcaggaaaaagctggaaaataaggaatgktcgttaaattttatgtggaaaaagataattgggcataaaacatttaagacatacttttggagtgtaaatcttcacattttttgttaaaagagtttcgtgactttctcctgaggctatctgtctttggttacctgaaactcctttattttctcyatagctatttattgaatcagacactgtgctggggctagggacaccaggttccaacagattttcttcccttgcagaatgttaccgaaataggatttttataaacctgtaggtctttgaaggcccctcctccaccccaccccaaatttctgaacgtctrtcatgaagtctcaagtattgttttcctggtctagaatcagtttttttcttcccaggattctattttaaagaaagacttttaaatgtttcatgctttcaataatgaaattatcaagaaaatacttgttttcctcaaaatattcagtggccctgaaratgcctgttagggcatcaatcattgcttttatgttgactgtaactgttggaaacagatgtccatattaaaaaagctgttaagaaaatatgttttaaaaatttgcccaacaggaaggagaaaattagaatctaatagcaaacttgtstcaaagcaggggagaccacatgatcttcytctttgaaaatctgtcctgggtgatgaccatatgctctctaaacaggttttctgtgttttagggaaagaagctcagaaaggacccctgctctttgatgacctccctccggccagcagtactgactcaggtacagtcttcaggctctcccaggtgtgtgtcaacgtctctactcatcctgggattgtagttgtctcaatctttttccctttcccccattttcaacacacagatgttttaggtgttggactgtctttaagttttgaatccatggcatcaggtaaggcagaaaaatctgctagtcgctagccctgagaagtactgcgaggaaatgtggagcagttttctctggttcatttgagtatttattttactacctgaagtacaatttaactttttaaggcagatttttatttcctttgaaataataggactttaaaataggttcaagatattattcattgcagtatgagttgccactggattgacgcaaagttttgagtttatttcagtaacctacataggtgtcctggtgggatggattctgaaacttaagtcttacatattttttgtgggctcactaagtgttctgctgtgtttcaggatcagggggacctttgctttttgatgatctcccaccmgctagcagtggcgattcaggtaagtggtaggaaaaatccaaggtgctgatggaaataatacatagtattttactcttaygtgaaatttatgtataggttttaacgggattttggatgacattaagtcataatacagcataaggtttactaaaactataaacaggcacattaattggaagcacaaagataatactgtatcactttctggtgatattaacttcttgaggttcagattgttggaactgcctttaagaattaagagttcactaatttactcttaactttgttattaacattttttaaaaattcagagttcattattccgatttgccttgttaaacagartgcttgactcaaatgtatcgaggctagtagcattggctctacctcctcctgaaaatgttccttttcatgtcctaattaagtagaagggaagaatagagcagattcctgttgccattgcggcaaaggtatgattctgtctcatgagaacttcttaggtagagctcctctggttggggaaggtgagggttaggagaggttgggagatagatggtgtgggggcagtggggaatgcaggtaatcccatktcgtatgcaggtatattttctatattttaggaaaagtactccagtcatcttatataagaattctcaatcttcagggctgtagacccataccaaaaaattgcagcatcctcacactcacagtgtggcctgaaaccttcccaataaagatagtacccttagttgtaatgaaagttaatatgttctggctgggcgtggtggctcacgcctataatcccagcactttgggaagccaaggcgggtagatcacttgaggtcaggagttcaagaccagcctggccaacatggcgaaaccctgtctctactaaaaatacaaaaattagccaggcatggtggcatgtgcctgtcgtcccagctactcaggaggcagaggcaggagagtcgcttgaacccaggaggcagaggttgcagtgagctgagatcacgccattgcactccagcctgggtgacagagaaagactctgtctccaaaaaaaaggaaagttaatatgttcaaagaaggctgttaagggatttaatagaagaaatgaagatacagcatagctgtctcttatttatctacaggacaaaaggcaaagtagtaaaaaatttagaagatttacataacactattaacaagcttaattttttggatatataatcttgggtctagtgttttagatttctagagaagttaacacattttttttttcttgagacggagtctcacactctcacccaggctggagtgcagtggcacaatcttggctcactgctacctccacctcccgggtttaagcgattctcctgcctcagcctcctgagtagttgggactacaggcgtgtgccaccatgcctggctaatttttgtatttttagtagagacagggttttcccatattggccaggctggtctcgaactcctgaccttgtgatctgtccgcctcagcctcccaaagtgctgagattacaggcgtgagccactgcacccagccgataacacattctttttttttttttccttttttgagactgtctctctctctgttgcccaggctggagtgcagtggcgcgatctcagctcagtgcaagctctgcctcccaggttcatgccattctgctgcctcagcctcccaagtagctgggactacaggctcccgccaccacgcccacctaatttttttgtatttttagtagagatggggtttcaccatgttagccaggatggtttccatctcctgacttcgtgatccgcctgcctcggcctcccaaagtgctgggatgacaggtgtgagcgaccttgcccggcccgataacacattcttaagcgggcaggaaccatttacaaaagttgattatgtactaagccataaaataagcctcaataatctgtttcttgtacagactacattctcagactacagtgtaatttgcttagaagtcaataacaaacctgtaaggtgtctttattttgaaattttattatttttctttttttctttttctttttctttttttttttttaagacagtctcactctgttggcaggctggagtgcagtgttgcgatctcagctcactgcaacctctacttcccgggttcaagttcctgtctaagcctcccgagtagctgggactataggcacctgccaccacacccagctaatttttgtattttcagtagagacggggtttcaccatgttggccaggatggtctcaatctcttgacctcatgatccgcctgcctctgcctcccaaagtgctgggattacaggcatgagcckctgcgcctggcctttttctttttcttttttttttttttgagatggagccttgctctgttgcctaggctggagcgcagtggcgagatctcagctcactgcagcctccgcctcctgggttccagtgagtctcgtgcctcagcctcccgagtagctgggattacaggcgctaccatgcccggctaattttttgtattttaattagagaccgrgtttcgccatgttggtcaggcttgtcttgamcttctgaccttagatgatctgcccatctcagcctcccaaagtgctgggatgacaggtgtgaaccaccacacctggccatctgttttggaattttaaaggaagaaagtttcacatccatatggggaaaactggaacccatacagtaagccacaggacactaatggggacctttgggagagatactgttggaaacatctgtgttgccttatgcagggtgcatatgtgtattatgttatactgttgcagaaatagggccttgtgcaactaatttacgcttcttgagggcaggaacattttcattactttttcctcagcactaagaaatgtctgacacaggcggttcaagaccaacctacccaacatggtgaaactccgtctctactaaaaatacaaaaatacaaaaattagctgggtgtgatggtgcackcctgtaggctgaggcaggagaattgcttgaaccctggaggtggaggttgtagtgagctgacgttgcgtcactgcactcgagcctgggcgacagagtagactccgtctcaaaaaaaaaaaaaagacaccttgtgtttaccaaaaaaattaaaaaattagccgggtgtagtggttcctgctttcagtcccagctgctcaggaggctgagatggaaggatcacttgaacacaggagttggaggctgcagtaaactgtgatcatgccactgcattctagtctgtgtgacagaatgagaccctgtgtcaaaaacaaaaagaagaagaaatgtctggcaaagagtaggttgagtaagtaaataagtacttgcatcctttttttttttttttttttttttttttaaagagaaacgtcttactactttgcccaggcaggtctcaaatgcctgggctgaagtgatccttctgcctcagtctccagaagtagctgtgactgcaggcatgtgccactgcatctggctgttgcatacttttatacctaaatgcagagaacatttcaagtcatttattaggacagcagctgcccttattggagattgatgtgttaggcactrtgacaaatgctcttcctacttgtcctgacccattttcaaacatccctctgagatgacagtattcttaccatgttacgcacgggtgaagacagctgagactgaaagattaagttgcacacctctttgaaacttgacttttctcatttcaaacacatacactgcagattcccttagctttgagtacagattcatccttttgctagtgggaacagctgtggcagccttattttgcctttgaaaggatgtattacagttcttaaaggctgccatttacctcattttgagccttttcgagtacttgttactttttggaacgtgattaggatatgttagtttgcttacagattttgtaagtgtttgtttaacactaagagcctgtggatataaaaacatgtatatgctacaggccaaaaaaaaccatgtatttttaccactgggaaaagtcttttacaaaccccttcagcagggtcagtttgactcagggcctggatcttaactttatgttctctcactgtgggacccccctccccctccccgccaaccatgaagacacaactcctgggtctgcctgtgtctgccagtccttgcttcaaatgaccttgtctttgagtgctaggatgaagcccagtctactagtgactttttccaacagtctacagctgtgtttctgtctggcttttactttatttccaggttctcttgccacatcaatrtcccagatggtaaagactgaagggaaaggagcaaagagaaaaacctccgaggaagagaagaatggcagtgaagagcttgtggaaaagaaagtttgtaaaggttttcagacaatttgaaaacaaatgtattagacttcatattttaaaacaacccagagcaaaaccagtttcagctttctaataatactttctttttatgtctgtatttaagaaataagtagggttccctttttgcaaatgaatttccaagtttctctgtgctttctcctacttttcatgtacatctatctctgatcctacctttgatcagataggaaacctacatttgttcctcaagagttaaaaaatacaggtggtttttttcttagccttctgcagtgaatggttagttttttgaccacctagtctctctctgacttccaatctttgtttgcagtttgtcaattagtgctttgaattacgtgatttagcttagtaggcagcttccctaagcctggaaaaagccgttgaaatttgtagtcagttgtgtaacttgtcaaagttagtgaggaagaaaacgaaaagtattaactaaagagaatacttcasttgtggtactaaagtattcttgagctgtgggattttctttttttctyttttttttgagacagagtctcgctctgtcgcccaggctggagtggcaccatctcggctcactgcaagctccgcctcccgggttcataccattctacctcagcctcccgagtagctgggactacagacgcctgccaccacgcctggctagttttttgtatttttagtagagacggggtttcaccatgttagccaggatgctctcgatctcctgactttgtgatctgcccgcctcggcttcccagagtgctgggattacaggcgtgagcaaccgtgcctggcccgagctgtgggattttcattgactgcattgtcctttgtcacagattacctcagtgaaagctgtatgatgcaggcagaggtatgtgaaaaaacccacttgtagctttgctgggaagatgtcatcttcaacttagcttgtcacttcccagaagacagctcttcacagtgttcattttattatttgtctggcattaggtatcagaaaataagcttaaatgagtctaaccattaaatgtaaatagatctctgcctgcaytggaatcttttatcsttttcttcctcagttgaagtaaaagcagctgatcttactgtttgttcaaattcttcaccagccttgagcatggaaatacatattttcagggcatcttaagggcttttgagataaactctcctgacttgcatttgtccttattcaattatcacaagactaatttgcacatgatccttttgcctgatttgaatctcacttctctgggatggcagcacatcccttgccctgatgctttgacttacaccctagacagagttgttttgtgctyactgactcctcttttgtgtccctgtgcaacctcttagagctcaccctgtccaacagtgctccgatttgagttatagacttgcagctgggggagatgccttaaggggtattgcttatttgtttgcgccattaggatattgctgagtcagacagtcatagttccctctcatttgctctgggactagggtttccagagggttgggcacagttttgtattggctcttttgttctcttttccttagcctcttcggtgatctttggtctgaagggctatgtggctgagcggaagggtgagagggaggagatgcaggatgcccacgtcatcctgaacgacatcaccgaggagtgtaggcccccatcgtccctcatgtgagtctcatgtggtaggaagcccggctggcattaacatctcctgggttctgactggcattttggactggctagtttgtatttactagaaaatctaacacatcacttgattgtacatcagtgattctcagctggggttgattttgctcmccgcccaggggacatttgtcagtgtttgggtacatttttgtcacaactgcgggagggagttgttactggcatctggtgggtagagactagggatgctggtaaacatcttagaagcacagggcagccccacaacaaagaattgttcagcctggaatgtcagtagtgtcgcggttgagcagccctgctgagcgggagatgacgcttcatagcatggctctgcagcgtgtgttactccttaccagcaactgagcggcttctggcagagaatatttttaatccatgacctagaagataagagttggaagccactaattaaagtatgaatggtgatcaagcagagctagtacagataatcagggcccaggaagaacaaaagtcaaaatgatgtcaaggaaaagacagacaatgaaaaattagctgcaactatacaaactaaaatgaagccttctggataagctcttgggcctggaaaaaaaccagaaggtaggacattaagttggctgtaaacatacattatagtacatatttaataatatatattacataggttacataattcagaattacataataaatacattacgtacctttactgacaccagttggtcattaacatacagtgtgctggagccgtttgggctgatggcgtttgtccagtagatgaggtctgctcatggagatgaggtgatggctgctgcagagcagctgatcatatgtagaggggacgagatacacacccattgagacagggtcttgctgtcttgctcaggctggagtacagtggcacaatcatagttcattgcaggcttgacctcctaggctcaagcagtcctcccacctcagcgtcctgagtagctgggaccataggcatgygccaccacagccggctaattttttgaattttttgtagagacagtgtctccttaagttgctcaggcttgtctcagagtcctgggctcaagccrtcttcccaccttggtctcccaaagtgccaggattactcgcatgagccaccatacccagcctgggatttgcattaaaaccaggaaagggacctctggagcccaagaaggcagatccattgagtgtaaatttaattgggaacactacatcatgccttgcaaataacaggcrgtaagaacagctctgagttataaaccagatgaggttttttttctcatggctcaggatgtcctaaattgaaaaggaattcyaaaaaacttgaaagaaaagcagctctctagaataaatgtcatttctcgtgggcatttttgttttttttttttccttgaaatagtttatttgatgtcttttattccatatatgtgggttttctggcaaaatttgaaaggggaatgggaataagagtagtaagataggttttaaaaatgagatatttaaaatttatttgagtaacaattctgtaatatcctccctgctcttatgcagtcatgtgctgaataacaacatcaagtcagtgatggactgcatatatgacggtgctcccataagattacaaattttgtagagatgggggtctcgctatgttgcccaggctggtcttgaactcctggcctcaagtgatcctcctgccttggccacctcccgaagtgttgggattaacaggcgtgagctgtcgtgttcagccataataccatgtttactgtaccttttctatgtttaggtatgtttaaatacacaaatactaccagtgtgttacaactgcctatggtatttagtgcagtaacatgctgtgcagtttagcctaggagcaataggctctaccatgtatgtagcttaggtgtgtagtaagctgcgccgtgttagtttctgtaaatatgttctatgatgttcacacaacaaagtcacctaacaatgcatttctgttaagtgatgcatgactgtattttttactgttttcgataaataacttgatctgtttgttaatgtttaaaaccaaatccgatttaaataggaacggagttctgaattttagttttgttgtcagtgaaaaatcagaattaacagatcttgatctttgaagcaaatgtgagttttaaacatttaatgtaaaatactgggaaaagtgttacatctcttttagaatattagacctttagcaggtcttgcagtcttcaccagaaacactcccacacctacacacacacagtgtttttgttttttttttttttagacagaatctcgctctgtcaccccggctgaagtgcagtggtgcgatctcagttcactgcaagctccgcctcctgggttcacgccattctcctgcctcagcctcccgagtagctgggactgtaggtgcctgccaccacgcccggctaatttttttgtattgttagtagagatggggtttcaccgtgttagccaggatggtcttgatctcctgatctcgtgatccgcctgcctcggcctcccaaagcgctgggattacaggcatgagccaccacacctggcccacacacaagtattttttttttaaaaaaagataaaatgctgtgaaagttacttaaatatttgtctcagttaaagccttttttttcccatttgtaacagtgtgactggtgtcttaaccagtgtgacttcctctgacttattaatgttcactctttgagacgaaatttaaaagctttaatggaaaagtgtggtttttgctgtgagaatttgattaactctcaattcgttctttcagtactcgggtttcatattttgctgtttttgatggacatggaggaattcgagcctcaaaatttgctgcacagaatttgcatcaaaacttaatcagaaaatttcctaaaggtgagactgagaactaaatcagttgatactcaarttggttattgctgtttggttggctgtgtgaagcagtcagatgtgttattttggctttagcagagartcattgatgagtcttaaaagagtggtgctgaggagtggatgccaaggcttccaggagtagcggccatgcaggtgtgacttagaatggcacttctcatgattctaagtgataggcaccttttgtcaatcgtctttgggttcagttagtgtcttgcctttactggaaaactagtaaaccaacttcaaatagcactgtgttatatgtgaggaaagaaacagagattgttctggctgggcacggtggctcacacagcactttgggaggccaaggccagaagatcactcaagcccaggagtttgagaccagcctggcaacatagggagactctatctctataaaaaaaaaaaacaaacctaactggacatggtggtatgtgcctgtggtcccagctgctcaggaggctgtggtgggaggattttctgagccccaggaggttcaggctgcagtgaaccacagttgcaccattgcactgcagcctgggtgacagagtgagacccagtctcagaaaaaaaaatttaaaaaaggaaagaaatagggattgttcttaatcatgcttgaaaatcaattgatgtgcagaaattacaaaaacaaaatggccagccctggtgacccacgcctgtaatcccagcatttgggaggccgaggcaggtggatcacgaggtcaggagttcgagaccagcctggccaatgtggtgaaaccctgtctctactaaaaacacaaaaattagcctggcatggttgcgcgcgcctgtattcccagctactcaggaggctaaggcagaagaatctcttgaacctgggaggcggaggttgcagtgagctgagatckcgccactgcattccagcctggtgacagaacgagactccgtctcaaaaaaataaaacaaaaaacaaaccaaaatgacagtgggaggaggataatcttccctccttgagagattgttttcttttggcccttctgtaataggagatgtaatcagtgtagagaaaaccgtgaagagatgccttttggacactttcaagcatactgatgaagagttccttaaacaagcttccagccagtaagtataacttgatgatgaagtttgagtggactgtgtgtggtgttttcctaaatgcatttcagtcttctgatgtggtttaacactattgctcactgtctgaaaagtgcgtagcaytcagcttttataaccgttagctaaatctaaaacagaaamaaagcaagtatcaaggaaatggttcattttraaatataagatacttcccattgagctctggaaattagtctcaaagtgctgggctattggtggtgactgtgtttctgatgtgtttcccyccaggaagcctgcctggaaagatgggtccactgccacgtgtgttctggctgtagacaacattctttatattgccaacctcggagatagtcgggtatgtggctctggagccacccacttagatgacaatacgttttatggggaaaagactttagcacgtacttgttgaataagattaaagtgatggtgtctggttgaaacctttcttctggggttgctgcagagtgttctgctgcagtttaacttctgggtaagggaacagcaactcagctagaggctgtttgttctctggggaacttacgccctatgatagacttgtgctttaaaacccagatcccgtcttttttgtttcttttttcctcccgtggtttgtgtgtgtgatgctgtggatcagaatgtaatcagtatgcaagtagcctaaatcttcttttatttcctttctctgaccttagacagtaatgaatgaaaagctttaacccctgcctatcaaagttactgtgatttcagagtaacttgagagctgtagctagaaaataccagatgaggtgccattcatcacccgagcccggtccctggctgagggagaaagcccagggtgttgttccccctggtgacagtcgtggggatgctgtaaagcctagagggtgctgctgcggaaagctggatgcagaccctgcctcctctgcatcaggaccatgtgttccgttccgttgccgctttttcacccggcctccttgctccctaggcagtcacaggaatcaagtgactgtccacacttaagcagcatctttagacccctccccacgatgcttctggggggatgattcatcaaatactaagtgctaggggtatggcagagactataacagatgacagcccctgcctggtggagtttacattctggtggccctttagtagactggccttagcccacatgtgtttagaccacatgacttcagaaatagcaagaggaaaattggcaaaaaaacaaagacaggagtcagacccaaatttgaatcctggctctgctctgtgactttattgagttacttattcttcgtgcctcagtgtcttcctgtaaaacagacacaatgaacctggcaggggcgagaacacctggaggcactggtgtggacggcctacctggcactcggccagcatgcacaacgcttgccctcctctttgccttccataggctcatggacatgtctctggccttctagactccaggccaaaagggaccttgatacttgttgagtgcttcctttcatgtcacaaatgtgacaacagccagagtgagcrcttgkctgtagttattcagcagagtttgtaccagagttgatatcaaaaccaggggcgactctctccctaactgttgtgtctttgacacttctttgctgcttgattctctgaacttacgtttatcagyaggaggctgaatgtgaaactccattgttaactgttttcttcaaactccattgttaactgtttttttcaactggtacctttagatgctgcgcccactgaatttcatgactattacaatctccatcttcccaggcaatcttgtgtcgttataatgaggagagtcaaaaacatgcagccttaagcctcagcaaagagcataatccaactcagtatgaagagcggatgaggatacagaaggctggaggaaacgtcaggtaaccaagggactgagaggagctcatgggaaggagggctgttagctgtagaagggtcccgagaccttcaaggagtagaacttcccctgytacgtagtcttcagtgtgaygaggctctgtctgagatctaacactggtgacataggtggatgacagttgtagatttcacatgtgtccacgtggaaggaaacttgcctccctacatttgcaaaaggacaaattcatatttaccattcacagtgttttctctgtgcctaggaagtttcttaaatactgtcacttttcgtggtggcgggcgcctgtagtcccagctactcgggaggctgaggcaggagaatggcgtgaacctgggaggcggagcttgcagtgagccaagatcgcaccactgcactccagcctgggcaacagagcgagactccatctcaaaaaaaaaaaaamaccaaaaaaaaaacctgtcacttttcacattgaataagttacagttttaggtgaattctccagagagaaaatctgaagtagttaagacgggttaagtaatgtctttggacttcttgggaacaactggcacagaggaccatgtcttacttggctctgtcttttgcagtttcatttcactctctctttaaatctttgaaaaccatatgtctgctctggttttattatctgcttctatccaaggcagctaaaggagggcataagtcttttctttagaattccacttcaaggacattgcattatgaattagaccaggagtattttctggtttatygtacagtttgactattaaaattttattttctgccagagataagagagatgtcatctcttagtataagactgcacttacctatcctttgaagtgtagtttctcttctgttgttcatttggggaagccttttttattgctccaggctgaatctagtcagtggtacagggaggtttctggagagtagttggaacccttagcgtttgttcaaaaagctcttggattagtaagaagcagtttcattcacggtcgctgcagtttacatgagcagtgatgggattataggcctggtttcaggcctcaagcagtgctgttkgcccagtttttgccaccgtaactactgtcctggtaactactgtggacagtcatgcctgagaatgtgactctaacatgagcgtaagcatcacctcttctcccctttcttgtaagttttacattcattctgcttttgcctgaactccttgaaaataattggatactgacagtccgatggctgaaagtaaggccagttgtgttgcagttgcttcctatatcccagtccttacctgattcagagaagtgtttacatgccttagagaaatcatttgacagtgtgggttttgggtgactccttcatctcagagaagggctgaggctaagagaccagcagcgtgggtcgctgcccctgagcagcagagccctgtcgtggtctgttctcctgcctgaggccagggctggctgccccactctcagcttttatcattaaatttttcagacatacagaagaaacttgacaatagtaaaacattkccaaatctactagcagtgaacattgtgtcatgtttagtctgtatagatgtgtgtcaggctgagctgtttaaaagttgcagatatgatgacataacagcctaaatacttaagcatgcatctcctgaagataaggacgttcttgacataattagtgagaattttcacacctaagacaataatatttccttaggttaagttatctaataccctgtctatatttttatttcccgagttatccccaaagtatctttgtttcaaaccagggtctagtcagcatccatgtctgccgtggacttggcatttctttttctttttctttttctttctttcttttttttttttgagagagagaatcttgatctgttgcctggagtgcagtggcacgatcacagctcaccgcagccttgacctctgaggttgaagcgatcctccagcctcagcctcccaagtagctgggaccacaggcatgtgccactgtgcctggctatttttttattttttggtagagacagggtctctgtctgtgttttccaggctgagctaagtgatccttctgccttggcctcccagagtgcagggaatacaggtgtgagccactgcaccctgccgagactcatttcttaccaggctttgaaccatgttataggccagcagttgtacagagtcaccaatattctgaacctgcgtatttttttacggtgttatttctgtatatttcctataaactggaagttaggtgtaagaccttctttagattcagatgagatgtttttagcaatgttttatgggggatgctgtatactcagtagtccttcacttcagtaggcacataatgtgacccttaattaagttgccaaatcccagcacttggctccggtggtgacagccggatgctcctgttgccttgcgtcatcagcaggtaatctggggaggttcactggtaccttgtgaatattctgtttcctgtcagcctttcacctaatggtcttagcatccctaaatcattatttcatcagggatgtcmaagatgatttccatattctgtgattcttttcacatgtattagcgggcattctgtaaagaaacttcttatcatcaataagagaacatcatagattcttctaaaaaagcagggtcaatgtttcattctgtcctttatccatttgaaaggaagatagtcacctatagttgtggaaatcagtgttttcctttcactcctctgcttctttccctccatcyttcctttgtgaatcactgtgtgccaactgactattcattgtgttgtagtcacagtcatggggttttctgctgctcacttgatttcagatatggccagtggaaactcctgctggctggttcctgtgtccttttcatatgtgtgtattaatgtttaagagccaaaatccaggctgggtgcagtggctcacatctgtaatcccagcacttcgggaggctgaagtgggtgaatctcttgagcctaggagttcaagaccaatttggcaactgtggtgaaaccccatctctacaagaaataccaaaaaataaaaaagagaaattagccaggtggggtggcacacacttgtggtcctactcaggaggctgaggtgggaggattgcttgagcctgggaggcagaggttgtagtgagcagagatcataccattgctttcaagcttgagtaacagagcaagacttttgtttaaaaaaaaataataataattgatttacatcagtgtagggaataaatttttttaaaaagcccaaatccatgttctcgggtgctcagttcagttggagtgtcattagttctatgtccactcaagacatgcaaagctaggaaacacaacacattttaaatcgcaagcttggagtgctatttcttactcatatttaacgttacagagttttctcttctttggtttaatatttgtagctcgtttctcttaatgctagwaatcttggttcttaacaacagtatatttatttgttaaaacagtttcatagtatcaaaattatcactactaggggagcagagggctcacacctgtaattccagtgcttcgggaagctgaggcaggaggatcgctccacgtcaggagtttgagagaagcctgggcaacgcagtgagaccttatctctacaaaaaataaaaatggcaccatggagccagttctggtggtgtgcgcctgtggtcccagccactcgggtggctgagacagaagggtcacttgagtctaggagttctaggatacagtgagctatgattgtgccactgcactccagcctagttgacagagtgagaccctgtctcaaaaaataaaaatatcctaactttagtttgtgttccttgctgttctcttgtccttagatatacctcactaaagcagtactgttggcactgtgcgcaaaagtgaaataactgtttttactgtggttattttgccactttggttattaatattattagttttccatttatttttattcagtttattgttttcagtttatccaatttataaagggcttttttccctttataaattacagggagaaaatgagaacccctgtgcatggctggtgggaatgtgaaatggtgtagccactatggaaaacagtatggcagttcctcagacattaaacacagagttagcatgtgatctgcagttccacctctgcgtatatacccaaaagaactcaaagcagggacacgaacagatatttgcatacctgtgttcacagcagcattattcaccatggggaaaagggggaagcaacccaaatgttcattgacagatgaatagataagcaacgtgagatgtctatataacagaatattatttaacctcaaaaaggaaggaaattctgacccatgctacaaaatggatgaacctgaggactttatgctaagtaaaagaagccagatgcaaaaagacaaacactagaatttcactcataggaggtaccagtcaagttcacagaaagtagaatggtggttattggggggtgtggggtatgaattctggggaatgaatcgtggggttagtgtttaatgggaacaatctcagtctgggaaggtagaaaaagtcctggggatggatggtggtgctgataacacaacagtgtgaatatatttaatgctgctgaactgtacacttaaaaatggttaagatggtaaatgtcatgtatattttaccacaataaaaaacatgaaaaactccctgttgcatgcttcaaaatctaaattgagtaaaaagacatttagagatgtcatgctttcatccctgtccccttcatcctatttcttgattctttccagtatttcttaacaaaagtatgtaaatctttgtgcattatttttttctactttcttacattgaaggtagctatgtagcagtgaatttttctgagaagattaagacaagttttatttttattttacaaggaaggcagctgaacagatgggamgtttacatatagcatttaaatttaaatgtcagtactgtgtgcctagaacttgatcaagtgcaggcctctgataaccaaaagtaactgttctagcattgtacctttggttatctctgtagcactcattgtattaatatgttggatttaggcatccaccagtctttggatggtcaggagatggagcttccacctcccaaccttaactttgcaaacatcacttgtggatagtctgtttattgagaccagctgtgtcttgcttttactgacatgcaagaggagctgaagaccaagcagcttccagctgcctttagcagccagattagccttaaacacacaagtagtaggatgtctcagtctcacccagtctctctctctctctggagaaagaacagaaaatatcaacaaaactagctaagatctgaagacactgttgaacagcttgtccaacagtaggaaaacagttttctggttggcagaaaacagagaagagaaataaagcagcacaaagcaaaagttggaagtgtgtaagggcaggaggccagtcctaatgagggctggtaccaagggacaggcagattggcttggtaggctgagacttaaaatgccactacttggccaggcgtggtggctcacgcctgtaatcccagcactttggggggccaaggcgggtggatcacgaggtcaggagttcaagaccagcctggccaggatggtgaaaccccatctctactaaaaatacaaaaattagctggcacggtggcaggcacctgtaatcccagctactcgggaggttgaggcaggaggatcacttgaacccaggcggcagaggttgcagtgagtcgagatcatgccactgcactccagcctgggcaatagagtgagactctgtctcaaaaaaaaaaaaaaaaaaaagccactacttgctaagcattgtaattatgagggtgggggggaaactgagggaaggggaaagagaatgaactttgggcagtttgtttgaactttgaaaactgggcaacggggagaacctgctgtgaaacagacagctttctattgtgtctagagtagcgcagactttctaagaaatggatgtggatagagtatgtattggtggcatgcgcctgtagtcccagccacttggaggctgaggcaggaggatcatttgagtccaggagcttgaagctataatgcgccaccatgtctgtgaatagccactgcactccagtctgggcaacatagcaggaccttttctcttaaaaacaaaaaagagttccggtgaaatggataaagcagactgggaaggacgaagcctgtggggctggtggggctgagtcccaaccagcttcatcagtggtgatccttttgaacttgtaccaaagtttccagaacagaggcggcatggatttacccttgtgtgatgctcgatctcagagatgggactctgtgattggcctttgttgaactgacaggtatttgaatgtgcacatcctatgtaggacatcgcattgagtgtaggcatagtgccagggcagcttgcctcatcgttaccaaacgcgtttcctgggatctrtcattctgtccattktgctttctcctgttactctagcagttcagtgaatgtaagattactactctgtatatggaactttgaaaacaagaatgaggccacattacgcctgtaatctcagcactttgggaggctgaggtgggaggactgcttgaggctaattgtttaaggaccagcctgggcaacaccccatctgtacaaaaaaaattttttttttatttacctggacttggtgacacctgtagttctagctactcaggaggctgaggtgggaggatcacttgagcccagcgagygattgcaccactgccctccagcctgggcaacagagggagaccctgtctctwaaaaaaaaaaagagagaatgagagatggcagttcctgtgctgctcatattgtccttctttagacttagagattgtttcacattgtctgtactgtgttgtgcagtaccagaagttgctggtagctacttggtcttctgggacctgccattgcagacgtggtgattgtaatcttaatcttgttgaaacaggatggatttatgactgggatggccggaagccacaccagacacccagtcacctggtcatgggagaggtactttgttggcttttcatagtacttacactgtgagctgcttcctgaagtggcactcttaaggccaggtgcccccacccatcttcagtcctcagctcttcccctgtgcactgtttcctcttgctatttaacagtttgtatcctagaagatcgctaggctttttgcagataccagcagaagtctttgaagaagaaaaaacatgtttgttacggatactgamctgtgagccactgagagggtaactggggcccagagaagggccaggctgaattctgcctttaggacagcagcccaggaagcatttcctaccatgtgcagccatctgcaccgcatctcctgaacttgcttggtccrtgatttgggagccccgtggtgatcttaaacgcccatgcgcagccgtggcatttgcggagtgctctctcacacgttgagtatggttctctgccttgcctttacaaacaagggcctgaaggggagagagcttgcagctgcctaaggtgacagtgctgcagcctagaccagaattgttctttggggcagtaggyttccccaaatggtttttccttggcaataggactgtcccttagatgtctcttcccatttgtagatcactgccccatctcctccatatcccctcacctaaaatagaatgggtgaaactatgatgctatgcaggatactgtcatttacattaacattaaaccgtacctgtacttgatgcaaaggacatgtgctccacaatccaggaatagccactttcagggattttccaaatctaatkagattgaaatgcaaaatatccctctgttctagctattgttaaccctggctgcatgtgggaaacactcaaggagctttaagatacaaaacactgccaggctcccttacccagtcagtcaaatccgattctggagttgggacctaggtgtgtgatgagaactgctgagtcctgtcgaaggttaagctgggcagcactgcttggcagccactggagrtgctgttcccacccatgtgcagctgggcagggtccctaccccagggcagcagttaatggcctagacacccctgcatatttgagatsaagaaatgtcagtagtggttaataatgtgaattccacagtctgtatctttcacacttccattctctgcttttaaggtgagattctaagtactgtggacccataatctgtcaggtagagtctgaaatgtttttcctctcattttagggatgggcgtgttttgggcgtgctagaggtgtcacgctccattggggacgggcagtacaagcgctgcggtgtcacctctgtgcccgacatcagacgctgccagctgacccccaatgacaggtaaaaggsccctataagaggcacaggtgtgtgtgcatgtgggtttatttctcttcctcacttccagtttctatcaagcctttgttggagggaaggtgtgcatggtgytaggccctgggggtgcagagataaacaraatgtggtttctgctctggtggggtccacagtggtaggggggacacatggggatgggcagctgcagtccagtgtgtcctaggcatgtgctgtgtgctggggtctttggcagtaggggaaggggttatccctgtcagagagaggagaaggggcttcctggcagagggaacacacagtaaggcattaaaatgtgacagtgtgaaagcatggccagacaggcgcttgagggacrgagggagtggtgggaaagtgatagcagggtactttgggggcagatcctgaagggccggccctcagccccatgctggagagtttgaactttagttgatcattggtggagaatcataggtttttacacagagccaggatcggttgagaaagagacagttcacctgttcatctcctgttctccatgcctaagggtacggcaccgtgctggctgagggcagggcctcaacaggtgatggttaaagatggcattatggggctagggaggcctgtgagcagcggtgcagcagccctggcctgatgatgaagggctgaactaaggcagtagcaggaggggtcaaggaaagctcccggaagcaggattcacagcactgagttgatgaggggaggccagagacactagtggcactgtggcgagtgggcctccgagtgctgctctgagtcccgccccagtgctgcggatgaagagcgcgtgccttgctttggcactcgcctgcttggccttgtcttgagccactgccccattctccacatcttcttcagtgtgtttgtcatgttctcacgtaccgcggggtcctccatcatctctccagcagccgccgcctctggtgttctgaaggatgcaccttctgctttgcttcctagctccccttcctgggttgtagtcatgggtctgtgtgattggttattgagggtctgagtctcaggacactggaaggggtgggagcctgccaggactaggccccacggtgttctcagcatggacgataggctcggcaagtagcggccgagtgaaagcctagttaaacgaggaaaacaggctgggtgtggtggctcacgcctgtaatcccaacactttgggaggcggaggcaggtggatcacctgtggtcaggagtttgaggccagcctggccaacatggcaaaacctcatctctaccaaaaatacaaaaattagccaggcgtggtggtgggcgcctgtaatcccagctactcaggaggctgaggcaggagaatcacttgaacctgggaggcggaggttacagtgagcgagatcatgccattgctctccagcctgggcaacaagagggaaagtccgcctcaacaacaacagcagcagcagcaacaaaaaacaaagaaaaaaaaacacaaaaaaaccccacagatattacagtgagaaaaggagggtggcttataccgcaaagctgtggggatgcgtattccccacccccaatgccaggagaactagaactgtcacattgaatccattggtgttcagaaagattccagggacggtctaggggggtttgattctgaaagggagagcatgtggttttcaaacacaggaacacgcacagctgccccttcttgggcctcggtcttggatgcagccccaagctgtgcagtgtgtgcccaaggatgtttcaccgaggctgggctcattctcagctttatgtctggaagtggtgtaaggcctatggtgttataaattcttgtatatttaccataacacccatgtttttattcagtgatttttctggagtttgcctaagaaagtacagcacctaatgtttgaggtaattaataattctgttaattggcgaagagaaggatagtctcagttttgatgtataacatcctatccacaaatacttgtaagtagtktaaacctttgtctcagaaattaagtgggtttaaacaaatcttagcctggccaggcrctgtggctcatgcctgtaatcccagcactttgggaggctgaggcaggtgaatcacctgaggttaggagtttgagaccagcctggccaacgtggtgaaaccctgtctctactaaaaatacaaaaaattacccgggcgtggtgccgggcacctstaatcccagctactcaggaggctgaggcaggagaacagcttaaactgggaaggtggaggttgcagtgagccaagattgcgtcattgcactccagcctgggcaacaagagtgaaactccatctcaaaaaaaaaraaaaaagaaaaaagaaaaaaaaaaccttagcctttgaatagttggacaaatatttattttatctccatctccaggccctttttttattttttattttttggttgggcctaaaacccgtttatatttctccctggtgttgtaggttcattttgttggcctgtgatgggctcttcaaggtctttaccccagaagaagccgtgaacttcatcttgtcctgtctcgaggtgagaaatctcacacgggggtggtggttgtcccaattgtgycttagttttcagagaagtagaagttctgagaccccatttcctcccattgtgggacagcccttgtgccctttttcagtgtgaactctgcctactgactcactggtcagtttgtcctgccagccctgatggagaccagagcagctcttcttcctggcagtcatgtctcaggaaagtgacagggtgcggggtcactccattcactcattccctttctcatctggtaggatgaaaagatccagacccgggaagggaagtccgcagccgaygcccgctacgaagcagcctgcaacaggctggccaacaaggcggtgcagcggggctcggccgacaaygtcactgtgatgrtggtgcggatagggcactgaggggtggcgcgcggccaggagcacgcatggtattgacttaaaaggttcattttgtgtgtgtgcacattgtgtgttttgtgtactcctgtgggactcccatggttgtaaataaaggtttctctttttttttcctagtcttttgagttattatactgtgagcacctcttgacccttcagagattgtgtttgcttttgaatatgctgtctttccttgttaaaaccattataggcatcttggactggctcgtagtggcctgcaggctgctggttgtgtgatgttttgtagttcacgggcattttgctgtgctttcactgtcatgatgaccctggttggggaagtggcatgttgcaatgaagagacccaggggatgactggttagtcaaggctaggcccagaccagggctttgggaaccctctagctcttttcagttttccctatggaaatagtgttgcaaaatgttacatagcatgagctcaggcttagccaggaaatagactcatagacaaggttactcatgcatcagacctgccagaaacagtacagaattagccattctcattccattggtgagagctgcagtctggtggaaggagtctgtggaggactcggttcagtggcttccatctggactccctgggtgtaggtgtgcaccttcctgttggagcaggcagccggctgctcagcatggcccggaaattctgcttcccacgtgaggtaggtgtggggagttggccctgtgctggaatgaggttaatctttgcaataacacctcaaagggggacacttctgttaaagatgttaaaagcatgaaaagagtgcatgaagaataataagctcagaagaataagctttaaaatacttttcaagcacttgtttatatagaaaacgtcatcattatgactgtaagtagtttttagtaaagcagctcttggatccttttgtgtaaatgtttggctcaggatgatgtaagattctaaaaatttgcgttttcagaatctgttttgtaatgttccctggcccccacccaacacacacacatggttttatcacccagttgattgagtggaattggtatccatgctgcgaggacctcagtggtaaaggcttcatgtaaaccttagatgcctcctgggggtctgttgtgtaaaagccacaagtaagaactgaacgaagtgttggtgctgccccttccttccccagggagttttaagagccaagtacccatttcagtttgaggactgggacattgtacagtgtggcctcattgaagaaaagagccctggcaccccagaatcaggaaatagaaccattcatttggtaactatcttcctatagcaaaccaggtgtttgcacactgatgtctgtgactcatacatccctatgtcccactgttcccgagaggcttgaccctagtttcccaggaaggttcactcccagccttcaagggagtccctcccacgtagaggctggaggccatctccacttcaccttccaggttcctccttactgtgcttagtttagtgaacctgggctaaaggattgattccggatcttaaggtctgccttttgttttgtaactgttgtgtcacatagttcttaagtaagtacttgaaccaccccacgaagtcagttatataaatatattccacttggcagtatttattagacaataaatactttaataaattgctgcataacacactgagaaaatgaaagagatgtggatatgtggcttttacaagagtgaaagataagttctctagaatatctgtgcccagtggatacaaagtgaaatctagataagggcgtggccacatcacccccttatcaaaacacacggatgcagtacccaggccagcccagtacttctaggtagggtgggtgtgagtcctactgagaatcgcaccaggcctttcccagggcagagtgtttggtttttgtgtgttactgcacttggggatggagatgtttgattcgatgttggggtttggaagctgggctcctggggatcattcgggcctggtggcagccacctcatccggaggctagttagttagaaggtgaaggtgactggccattgctcccttctctcccaggcctgagcgcccttgccagaccagcttggctcccaggaggtcctgaggcaccaggttcttcgtagcctgttgtgtggggaggcagtgggttaactcttcctcagcaggtaggaggccctggaggtcgctgccgagggccttgtcctcttcactacctactctgggacagtcctgtactttggggaaaatgtgggaggctacatttgaggaggctgcgggctcacagcctgtgtgtcctcatgagagctgccgtccccatccccaggccccatcactgccacaggagcacagcaggcttgggaccagccctcccaagaccaccctttctcgggaccatctctcgtccaccacctgtccaatgtcagcgccgcatggccacccaagtgggaaagatgcttgggaggctcatcccagagccgctggacccagccaggccctggcacccctggtggaagactctgcttcagctattcggatgatgggtcagcaggcccggctgtctccaatctgtaaagacgttctagatctttcctctggtgggtggctcctaccagtgagtcagcacctcagaggggaggggaaaagggatctcatccacctctggagagggtggaaggggccttggctgtgaagatttgcagaggaggggaagagtggagctcccatttggaaaggccttctgaggtgaatttgtgagttaatcttgcacacattagaactagaagctgggcccagacttactgtcccccaaaggcccttgtccagtgcccctctggcccaggctaggcagtgctcagctccactggcaggtagaacacggttaggggaggggcagggaagaccaaggagcccagatggagaccaggggagtggtgagtgaccccgtcccttctaagcagtaagaacacacagcgtacgtccctgtggcagccccctcagccctgcgtcagctgaccctctcccaggtaggggccctggctggtgcactttgcactccatgagaacatgaagagaggtggaaaaggtggggctgggcacaggaaagacgcagaggccatctgggcaggtgctgagcaggccaggaaagagtcggcctgcagctggagactagcaggtgcccccaggcacgccgactctttcttccctggataagagcccaagatggtgtcctgaatcaaccctggctccgggaccaccagcgtgcgtgtcacgtccgtaggcctgcctgcagtggctctgtgggctgaactgcagtggccagtgtgagcagagttccgggtgggcctcctcctccatgtggccactgctactctgacactgtccacacattgtctagatctgtgctccatttgcccctgagaggaagggcctgtggtggccgctcacacgcccaggaggacagcactgaagtgggagccactgcgcactgtgagggagcagccgctggcgttgtccaagaacacggaggtccactgccccatctgcaaggagggtgcctttgaggcactgggccaccccaacagcctgcagaggtgacccaagggccagccagccacactccctcctgcccactcagccccgcttttgggaagggctcaggcccagagaagaatgtggccgccaaggtcacagagcaagggcccgcacgggttgggccccacccagcacctcttctgctttccctgcagcgccctacagttcgcgtgtgtgggagtgggcccctgctcaaggccagagtgggattcaagagtccaacaggtttctcagctgcagggcttctcagagcctgcaagggctccaagtcaggtgggagggtggcccttccccacaggcagtcatttggcagagccttccgtgaaaccagcactctagcctggctgctccaaacgtggtcatgcaccagcagcgtggtcatgcaccagcagtgtcacattccctgggaactcccagaaatgcagaatctgggatccacccagacctgcctcaggatctgcatcttaagatccaggtggggcagagaccatctgagttcaccaagcatgctgtgtggcacccagaagggacctctaaatgcctttcagcaagcacagactctgggccagacagcctggcctccatttctggctctgctgtgtgaacttgggctaactcggggagtagctctaccttctccaaagctctgggagaattcaatagcagctgttattccacacacctgcactcaattgttttctttgttagtaaattccacctttatgtccatttctctaccacttgccaaaattcccacagtgccagagatggtcacttagggttttgggtaggaaaataacgtatctggcttcccatagtcacaggggactcagggcgtcagcctggrcagagtgctggcctccattccctccctgcaccagtcccttcagcgggcttgtggtggccaggagtactgggcctcaggatgaggtgctcagggagtctgaatattgggaatgcagagcggagcagctgctcaagcgggcaggtgccctcggggaagggctgtgtttggaggaaggagatcaggacttgaagcctggctgcgcccagaccaaagtgagaacttggcatgtcctggaccctctcccaggcctggagtctgagggtgctgcacccgacccagtgatcctgagcatctaacagcacccttctgcacccagccacccgtggccatgcccaggcggtgcccctcgatgcccaagcctgccgcactcacctgcaggtacaggacgccattcacagagatggtgaagagctcactgctgctctccaggcccatgatggcctccagggagctgtacccaaaacagagggagggtcagcctgccccatgagaccccaccaacttcacctacgacacacaatcctgccagcagccaacacatgcccagcaaagtgcctgaccctggccaggtcttccagtggaggtggtgtctgaaccgagtccccaagaggaggaaggacacagggccagaggcatgcttgctgtattgggaaaggcaaggcgagggcccagcaagaggcagcaaagccctggctctgatgggaaacaggacactggctgatgcagccggaagtggggatgtggtggcaggtgatgctaagttagttcaggccaacacactctgggggttcaaaggcagactaagaagttttggacttgatccattcattcaagtctgctccagctatcctacccgcagggtatctccgctgtacctgggctcccttctgggtgtggggagacagggagctcacagtcactgcactcgtgggccagatggtgcaggagcaagggatgcgatcatggggaagaaagttcccgggtgaggagtgggagggcgactgaggagggggcctccagaaagctgtctggagaggcctcttgaagtaacactggtgcttcgagccccaagatgaaagtccctgaggtgggaaggagttgggaggctaggaggagcccggcctcctaggacctggggaggaggtgaaggtctgggcagggagtggcctggaaaggtttttttttgttgttgttgtttgtttttttgagacggagtctcgctctgttgcccaggctggagtgcagtggcgctatctctgctcactgcaagctccgcctcccgggttcacgccattctcctgcctcagcctcccaagtagctgggattacaggcacccaccacgcccgggtaattttttgtatttttagtagagacggggtttcaccatgttagccaggatggtctcgatctcctgacctcgtgatccgcccgcctcggcctcccaaagtgctgcgattacaggcgtgagccaccgcgcccagctggaaaggtcatttttaacagctcccagttgctgtgaagggaaggcctgataggggcagaagtagaccgggagacctggaagaaggtgtggggtcacctaggccacggtggggtgtgaacgggcggaagccccgtccagtgcctgtttaaccacctccagcttgtggaagcc

SEQ ID NO: 95108 - DNA, 69438 bp, Homo sapiens
ccattgcactctagcctgggtgacagagcaagactttgtctaaataaataaagcagtaaacaaaagaggggtgttgaaattcctcccatgagtaatccattggatatgtgaatatattttattaagtttttttttttttttttgagacagagtcttgctctgttgcccaggctggaatgcagtggctcgatctcggctcactgcagcctctgcctcccaggttcaagcaattttcctgcctcagcctcccgagtagttgggattacaggtacttgccaccatgcccaactaatttttttgtatttttggtaaagatggggtttcaccatgttggccaggctggtctcgaactccttacttgaactcccacctctgcctcccaaagtgctgggatgacaggtgtgagccaccacacccagctctatttttatttttaatatggcaaaatacgtataacactaaacttactaccttaaccatttttaagtgtatagtcataaaaattttaatttaaatactcacataggcttgtagctactatattggacagggtcaatttccaattttttccctgagttagtaagtcacctcgtccatgcgtaattcatcactcttttatcagctggacttttgagacttagaaacaatgactttttttttttttgctgctgtattacattgaggcgtataatatttgatcaaattatgttgttagggtctggcgcggtggctcatgcctgtaatcccaccactttgggaggccgaggtgggtggatcacctgaggtcaggagttcgaggctagcctggccaacatagtgaaaccccgtctctactaaacatacaaaaattagcctggtgtggtggttggcgcctgtaatcccagctactcgggaggctgaggcaggagaatcacttgaacctgggaggcagaggttgcagtgagccgtgatggcgccattgcactccagcctgggcaacagagcgagactctgtctcaaaaaataaaattaaaaataaaagaaaagaaaatagaataataaaataaaataaaataaaatatagttgttagaataagaagcacaactggcataaacaggtttgggaatacacagcttgcactcagtgagcacacagcgagcctggtatggaagtggatgcatgtacatttcagagcaaccctgcaaggtttccgtatgaaccagcgaccatgcatcctctgtgggggatagaccttgggttcatggatgakttggttaattgggtgtcttggaggttggctgagagctcccactgttcttgactcttaagacaagatggcacatgaggtgaaagcaggtgccccagtggaggatcctagaaccagccaagtagtgaggatccaaccgcccccttgcccagagaggcaccagtggaggacgcacaggtgactcacactgccagctgagtccccccttccccatttccagtgtaaacacctggattcttttacagagttacccttgagttcactttgcccttggctctgggggaagagagagtctcctggggtctgctggattaggagatgaatgttgccaaatgaatgcttctctttccgcagctgttgcctttatgcaatgccatttctatcttcagttctttctccattaaaatgtgagccatggcctggaatgaacttcatccctctgtgtggaggaagtgtcctcagctgcccagacaggctcagcttcgggtctgtgtaggaagaacccgtggaagggagtggggagtcgagctcaaagactaacagccaagactctgggagagtggtcagctcagagtcctcaggggagggggtgtggggatgagagtccacgttattatgttacctggggcaggtgggataaaggtaagagaaggtaagtggagggattttagtggcatacaacgactgcttttgttgcagagagcttattaggaagcagatgagaggaactgagcttgcaaaaggtttgtttagaggggacccacccttgggatggatactggtggaagggaaagggaagggaagggaaacaaacaggattgggggagacagagagacacagagagagagagagagcatgagaagtccagctgcccccagctctgtagctgggatggtccctgagttgtcctgagatttggggagaggggcccgagattttatgcctccatacagatgttggtggcccggggaagggaacaagaccctggatgaggacgtgccatttggcagatgctgacctgaaggggtggacagcagaggtctgcttccagcaacattcctagaggctggggcacacatctttcatcactgaaaagatctgggtagcacagcagcgtcctcatccttgctgaaacttgtctgggatagctatggacagattttctccaaggagatttacttttccacggtgagagggtgtgtgtgtatgtgattatgtgtctctatgaaggtgtgagtgcatatgtgtgtgtcatactctatgtaactgtgtacatgtgcatgcgtgtaattatgtgcacatgtgtgactgtgcgtctatatgaaggtgtatgtgagtgtatacgtgtgtgtcatactgtatgtaactgtgtatgtgtgcctgtgtgaattaagtgcacgtgtgattgtgcatctatatgaaggtgtatgtgagtgcatatgtgtaagtgtgtgccatactgtgtgtgtatgtaactgtgtctgtacgagtatgtgtgtgtgaatgtatggtgactgtatgtgcaaccgtgtgtcagcatgagggtgtgtgtgcatatctttgggagtatgtgtatgtgtctgtgtgtgtctgtatgagagtgtatatgagtgcatatgtgtgtcataatgtatgtgtgtatgtaactgtgtgtatgaggttgtgtgtgagtctgagcaagtgtgtgcatgtgtgtgcgagtgtatatatgtaattgggtatctgagggtgtgtgaggatgtggggtgtgcaagtgtgtgcaggtgtgaggacatgtgactgtatatgtgactgtatctgcatgagggtgtgtgtgcctgtgtgtatttgtctgcatgagggcacacaggagtgtgtgtgtgagattatgattatgtgtataattaggtgtctatcagtgcatacgtgtgtgagtgtatgtaactgtgtgtctgtatgagggtgtgtgagtgtgagaatgtgtgtgcatatgtgaatgggtgtgctgtatataattgtgtgtgtatgagggtgtgtgagtgagaatgtgtgtgcatatgtgagtgggtttgcgtatataattgtgtgtctgtatgagggtgtgtgagtgtgagaatgtgtgtgcatatgtgagtgggtgtgcgtatataattgtgtgtctgtatgaggctgtgtaaccatgtgtgtgcatatacgtgtgtgggaatgaatatatgtagtcatgtgtccatatgagggtgtgtgtgagcagtgcgtgcatatgtgtgcatatatataattgtgtctgtacgagggtgagagtgtgagcawgtgtgtgcatatgtatgtgaatgtgtgagtgtgggtgtgtaattgtgtgtctgtatgagggtgtgtgtgaccatgtgtgtccatatgtgtgtgtgcatgtaattgtgcgtatgagggcctgagcaatgtgactgtgtgactgtcacacattgtgtgtctgacagtgtacatgtgtacgaaatgggatgtctctataatgaggcacgtgtgtgactgcatatgtgcatgactgtggatgagtgtgcatgcatgtaatcatgtgtctgatagtacatgtgactgtgtgtgcgcatgtgtgtgtgtgcgtgcctgccagtttgtgtctgtatgaaagtatttgaattgtgtgaacaggtgtgattgtgggagcatgttatgagtgtgagtgtatgtgagtgtgcttgtgattgtgtgcccatgggaaggtctgtttgtgtgtgagtacctgtgcacgtgagagtgtctgagcgagcgagcgagcgtgtgtgcaacttgcataaatctgtctggcaccagcaaagtggctcaactgtctttagagacagaggtcccttccctcctgttggggacctcttgacctgctccctcccctccagcttcacccctgtccaaggaggctgctcctgatcccaggattctactggatggggggttggggaagggtgtcacctcctttcctttataggcatgaccaggcatggcccccaccacttatgcccacatcccacagggcaggatgtagtcacatggacacgccatgcagtcagggggcctgggaaacattctctctctttaggtgagagctctggggaagaagggctgaatggacattggtggacactggctgtcctggcacagctgcccaggtgctctgcagagtagatatttgtgaaacattaagaaggccctggtggccaggtgcggtggctacacctgtaatcccagcaccatggaaggttgaggcgggtggatcacctgaggccacgaggtggagaccagcctggccaacatggtgaaaacccatctctactaaaaatacagaaaattagtcgggagtggtggtgcatgcctgtaacctcagctacttgggaggctgaggcaggagaatcgcttgaacccgggaggcagaggttgcagtgagccaagatcacgctattgcactccagtctgggcaacaagagccaaactccgtctctctctctctctcacacacacacacaaaaggccctggagacaaaggaacactccttgtccttttctcctggcacagcacaagattctgttgctacatctttatttactgagcatctagtatgtgctgcacctggcactgttttgtcttttttgttttgagacaaggtcttgctctgtaggcctggctggagtgccatggtaccatcacagctcactgcagcctggaactcctgggctcaaacaatccccccacctcagcctccctactagctgtggttacacttgcgcaccaccacgcccggctaattttttaaatttttctgtagagacggggtcttactacattgcccaggctggttttgaactcctggcctcaagtgatgctacggacttggcctcccaaagtgctgggattccaggcacaagccactgtgcctggtagtggacattgttagcagtgactaaagcagagaacgagaagggggaggccgctgtaaacacatgaagacaggcagcgtaagagaaagtcacgagggcaggaataacatccaggcatacttcagatcccagctcaagaaaccactcccaggccaggcgcggtggctcacgcctgtcatctcagcactttgggaggccaaggcgggcggatcacaaggtcaggagtttgagaccagcctggccaacatggcgaaaccccgtctgtactaaaaatacaaaagattagccgggcgtggtggcgggcgcctgtaatcccagctactcgggaggctgaggcaggagaatcgcttgaacctgggaggcagacgttgcagtgaactgagatcgcaccattgcactccagcctgggtgacagagcaagactcccgtctcaaaaaacgaaagaaaagaaagaaaccactcccagactccctgcctgggcgggatcctttgatcaagccctcaacatgccttggggctctcttcacaatggtaagtttgcatttgtttgtgtgattctaggcctcctcttattttcttgaacaggcctcatctggctttgttcatctttatgtctccagcatccagcacaatccctgccattagggtcatggcttcataaaaacgtcacgaatgcaacgcagaagtgcatgcatgcatgaataaatgaatgatgcatgaaaagagcaatctccctgtcctggaagcagcttcccctaggggtgggggtggggtgcggaggcaggggcagccagtgatgtcacaagaggtggctgggatggaacgttctggaaggttgaatggggtagaaggcctgttgtggagggaaaccacccatcctcctgcctcccaccaccaccatcatcctggctggacggagagggtgacgggggctgggaaggggcagctcatgttcaggtttccaggaggggctacctgttgactgtctttgcaggaagaagaaaacacctgagtgaccagatgtcccagctccaggtgccttgccagatggccagaaccacacctcttgaagagtgacaggtgccagtggtatgggagaagggcatgcgttttcttttcttttttttttgagacagggtctcactcttttgcccaggctatagtgcagtggcacgatctcagctcactgcaacctctgcctcccaggctcaagtgatactcccacctcaacctcccaagtagctgagattacaggcgcctgccaccatgtccagctaattttttttttttttttgagacagagtcttgctctgttgcccaggcgcaatctcggctcactgcaagcttcgcctcccaggttcacaccattctcctgcctcagcctccygagtagctgggactacaggtgcctgccaccatgcccggctaattttttgtattttttagtagagatggggtttcaccacattagccaggatagtctcaatctcctgacctcgtgatccacccgccttggcctcccaaagtgctgggattacaggcgtgagccgccatactcggcctaatttttrtatttttagtagagatggggtttcgccataccagccaggctggtcttgaacttctgacctcaggtgatccacccgcctcgacctctcaaagtgctgggattayaggcacgcgccaccatgcccagctaatttttgtatttttagtagagatggggtttcaccatgccagccaggctggtctcgaactcctggcctcaagcgatccrcccgactcagcctcccaaagtgctgggattacaggtgtgagtcaccacatctgaaccctacatggccttttaaaattgtgaaacatataatgcatataaaataacacaaagcatatctgtacgatttaatgaataacgataaatatctgtgtgcccttttcacttcgtgaaatcgaatattactagtaacttacaagtcctctgtagagaactcctgagctcaagtgatccacctgccacggcctcccaaagtgctgggatcacaggtgtgagcctccgcacccggccgatcgtgtgatttttaacgtgcagttccctgatgaccaaagctactgagcatcttgtccaggatttgtagccctttccaggctccttttttgtgaactgcctgtttacatttttcatcataaaacactgggttgtttacatttgtcttttaaatccagagttcttttcatactccggatactaattttatttgcccattttgcattgccataaagtaatacctgaagatgggcaatttataaagaaaagaggggcctggtgtggtggctcacacctgcaaatcccagcactttgggaggccgaggtggcggggttggggggggggggggcttgcttgaggccaggagttcaagaccggcctgggcaatatagcgaggcccccagctctacaaaaataaaaataaaaataaattagccaggcgtagtggcatgcttctgtagtcccagctatctgaggggaagagagttccaggcagagggcacagcccgtacgaaggccccaaggaaggactgcacctggtgagttggaagaacagtgaggaggcccacgtggctgcagcagagtgaggagggggagggaggaaggaggagagcacagggaggtgcagggccttgtggaccgtggggagaacttgcgcttttacctggagggaggtgggagccatggagggctgcaggcagaggagagacagggttgggccagcatttcacttttttatttttatttatttatttatgtatttatgtatttatttatttatttatttttgagatggagtttcactcttatctcccaggctggggtgcagggcgagatctctgctcactgcaacctctgcctcttgggttcaagcaattctcccacctcaacctcctgagtagctgggattacaggtgcctgccgccgtgcctggctaatttttgtgtttttagtagagacagggtttcaccgtgtgaaccatggccaggctggtctcgaactcctgacctcaggtgatccacccgcctcggcctcccaaagcactgggattacaggcatgagccaccrtgcttggcattcatttttatttgtaaacacttttatcgtggaaagtttcaaacacaaaagtagagctgatcataacataagcccccarctacctatsactcggctccaacttaaagtcagccttggtcatttctgtgtcaccccactcctcgtgggtagttttaaagcaagcaccagacagtgtgttctttcatgcatgaatcctttggcaacaaggattcctttctctaacttcaccccaaagcaattatcatactttaaggaagtaaacatcccctcttcatttcttcatgtcgtctgagacacagtcagtggtggagttcttggcggcctcgtgcacatcttgtttgaattgagatctagcagaacccacaatgcgcctgggtgatgggcctctcacgtgaccaggacctctcaggctcctgggaggaagcttaggtccaggcaggcggagagagtggatcccattttgaaggctgagctgatggaattagctaatgagtcaatgtgctaggaagagagagggagagagagaggggaagggggaagggggagggagggagggaaagaggaaggaggaaaaggaaggaaggggagggagggagggaggaaggaaggaaagaagggagggagggaaggaaagagggaagagagagggaggaaggaaggaaggaaggggaggaagaaagaaaggaagggaagggaagaaggaagaaagaaaaggcagggacggagggaggaaggaagagaggggaagaacgaagggaggaaagaaggaagggagggagagaggaagggtaggagaatgggaaaaaggaaggaaggggagggaagaaggaagtagaaaggagggaagaaagggaagaagcaaagggaggaaggagggagggaaggaagcaagtcaaaggtgaattaaggatgactttgaggttctgggccagatccagctgctccagaggggccttgggcttcctcctcatttcttcttgggccgcacactccgtgcatgtttttcatgcatatctgtagcttggtctggatctgctgttttgggctgctcgctttgtcctgctgattgatctactttgtgtgtgtaaactccgtaggctcattcaagttcactttacttatttttaaaattaaacttatttttttttttttgagatacagttttgctctgtcacccaggctggagtccaatggtgctatcttggctcactrcaaccttcacctcccaggttcaagggattctcctgactcgacctcccaagtagttggaactacaggtgtctgccaccatgcctggctaattttttttgtatttttaatagagacagggtttcaccatgttggccagactggtcttgaactcctgaccttaggtgatctgccagcctcggccttccaaagtgctgggattacaggcgtgagccaccgcacctggcctcaagttcaacttagaacatggccttttagccacctgttttcactgaaatacaaaatcagtttttgctggtgtaagaatcacgtgcatgttacagggcttcattcaccagagggtttactcaagttttcacctgctgtgttcctgcactcactgatggaaacttttagagttcataaaacattactgcaaatctagaatccagaacaactgcttgattcttgtrtcaagcacgctctttatcatgaacaaaatcgtacaattttcctccctgaaagccactagaaaaatcagtttcaataaatgttgaccaacaatttggcctccacttcccccaggggacaaagttgacaatatctggagacatttttgattggaataaatttatatttagaatttgtgattttaggccaggtgtggtggctcacacctgtaatcccagcactttgggaggccgaggcaggcagatcacctgaggtcgggagtctgagaccagcctgaccaacatggagaaactctgtctctactaaaaatacaaaattagccaggcataggctgggtgcggtggctcacgcctgtcatcccagtactttgggaggccgaggcgggcagatcacgaggtcaggagatcgagaccatcctggcaaacacggtgaaacccagtctctactaaaaatacaaaaaaaattagctgggcgtggtggtgggcacctgtggtcccagctactcaggaggctgaggcaggagaatggcgtgaacccagaaggtggagcttgcagtgagccgagatcgagccactgcactccagcctgggcgacagagcaagactccgtctcaaaaaaaaaaaaaaaggaattaacacactgagaattaaacaacctgaaggagtggtggtacaaacaccactccaaagccctcaaacagtagagtccaattaatgactatgcaaaaacccagggtagccccggaatcctgtccgctactgatgggttaaagaccatgtgatctcggccaggcgcaatggcttacgcctgtaatgccagcactttgagaggctgaggcgggcggatcacttgagcttgggagttcgaaaccaacctggctaatgtggtgaacccttgtttctactaaaagaatatttttaaaaattagctgggtacggtggcctgtaatccctgctactccggaggctgaggcacgagaattgcttgaacctgggaggtggaggctgcagtgagccgagattgtgtcactgcactccagcctaggcgacaaaaccaaaccaaaccccatgtgatcttaagtctgattactgataagtgttttcgaaagagrtggcattgatttttaccacratgaatgagagcacctgttttcccacattttcataatagacaatattgtcagcttttttgatcttacttaacctgaaaggtgaaaactgcatcatattttctgttgtatttctcataggactgagtttgagcatgtttacttctttttaaaagtcatttttcagtttcagataattatctattcatgtcctttgcccrctttcccattgggttttggtctttttctgattaattcctcagggttctttacatatgagggaaatcaagcttttatactttggatgtattgtccacatctttccccaatttgttgttgatctcttgatttttgtttgtggtattcttggccatgtggaaaatttaaaaattttatgtagcaagacttatcctgtttctcctttaggccctttgagttttcatgttaatattacctttaagagaagataaatgtgtggtcccatgagagtttctttcccctgggaggcttcaaaatattttctcacccacagaattgtgtatagacccagactttatattctaacaatttaagagactcttctgtaaactcacagattgaataccctctgggttttacaaatgctctattatctggcatgccggccactctcctctcctcccaggcccaggacaggcatgaccaatggatcctaggattctaggcagacatgaccagtggatggaagagttggcctcatmcctacagcccctttgccaatcctgttaaactccctgcttttttgctttgcagtgctgtggagcatggtttctgcacacctggaatgactggaaccccaaagactcaagaaggagctaaagatcttgaagtagacatgaataaaacagaaggtatattgcactaaagagtacgtgggagagagagtggcacattgattccacaaaggctctttgcagaggagtctggatctagaaagatgtagccattccttgcctgaccctgctgaccccgaccccccacccttttgttttgagacagggtcttgctctgtcacccaggctggagtgcagtggtgcagtcatagctcactgcagccttgaccttccaggctcaagtgatcctcctgcctcagccctccaagtagctgggactacaggtgcacaccaccatgcccagctctgtattttttttgtagagacagggtttcgctatgttccccaggctggtcttgaactcctgggctctagcaatcctcccaccttggcctcccaaagtgctggaattacaggtgtgggccaccgtgcccagcctagggcctattttctattcttgataggttgttgaggtagcagggcaagttgttcacataattcagagctctgctctactggtgatgtgacactgggcaagtcacttgctctttggaggcctcatttgcatatctgaatgatgggggcattgataacagcacctccctgtcaggttggtgagcccgagtggataaagtacccaggaatcatccatgtagatagggtgcggatatgatcatagtgatttattaacattaggctataatcattttactgtcagagctaaagtcaagggacatggtgacatcatagacagctctgataccagtgggttgggggaggtccccaaacgccggtgggacctcgaacccagccattatccaggctcttgacaccatcgagagtgaattcaagaaacaagtcagaaaatagtgaaagtgggccgggtgcggtggctcacacccgtaatcccagcactgtgggaggccgagacrggcggatcacgaggtcaggagatcgagaccatcctgactaagatggtgaaaccccgtctctactaaaaaatacaaaaaattagccaggtgtggtggcgggtgcctatagtcccagctattcaggaggctgaggcaggagaatggcgtgaacccgggaggtagagcttgcagtgagccgagatcatgccactgcactccagcctgggtgacagagcgagactctgtctcaaaaaaaaaaaaaaaatagtgaaagtactgaggtttatggcaaataaaagtacttgcattgcaaagtacacattcaaggagagggagtgcaggcgtgcttgaaagatagcatcacacacaaaggagtttggggatgctacctttatgggtccaaagggtggaatattcatctaaatccctagaaaactggccgggcacagttcacatctgtagtttcagcactttgggaagctgaggcgggcagattgcttgaggccaggaattcaagaccagcctggccaacatgacaaaaccctgtctctcttaaaactacaaaaattagccaggtgtggtggcacatgcctggattatagtgagtctcaacttattgcaacctctgcctcccaggctcaagcgattctcatgcctcggccacccaaacagctggcattacagkcatgcaccaccgtgcctggctaattttttttttttaacaaagcgccccaaagtgggtgtctgaaacagcagaaatgtattgtctcacaattctggaggccagattactgagatgaaggtgtgggtagtgaggttgcagtgagccaagatcacaccactgcattccagcctgggcaacagagtgagactctgtctcaaaaaaacaaaaacaaaaacaaaaacraaaacaaacaccagtcattggatttagggatcaccctaaatccaagatgatgccatgatgtcatctcaagatccttcactaaatccacctacaaaaaccctgtttccaaatacggtcacagtctgaaattctgggtggacatgaattttggaggttcaccatgtaacccactacagtcattaaaatatcccacaagtgtccaggtgacacctccatgtttttgtccaatttaaagcatctccactcccccctgcttcaggctggggtcaggaaggcatgataaggtgctctttgagttcctagatgctcttctcctcatcacccccatctccccaggtggtttctttgtgagctggtgctgactcccagagctgattagctcgggaaagtggggttgaagggggcctgtatgaactaggcttcccttgttgtaagttgttatgagattaattgtgcatctccaattcctttgtggaagtcctaacccccaggtgctcagaatgtaaccttgtttgggaataggatcattgaagtaatttggtttttttgttgttgtttggttttgttgttgtttttttgttagttagtttgtttgtttggtttttgagatggagtctcgctctgttgcccaggctggagtgcagtggtgcgatcttggctcactgcaatctccacctcccgggttcaagcgattctcctgcctcagcctccagagtagctgggacaacaggcgcgtgccaccacgcctggctaatttttgtatttttagtagatacagggtttcgccatgttagcgaggatggtctcgaacttctgatttgaagtgatccacctgcctcggcctcccaaagtgctggaattacaggcacaagccactgcacccagcctactgaagtaattagttaaaatgacgtcatgaggttaggtcccaatccaatgtgaccagtgtctttataaaaggaggaaatagagacgaacctgcacacacggagaatgtcatgtgaggatcgaagcagagtttgcagtgatgcacctacaagccaaggaatgtcaaggattgccggcaaccgcagctaggagaaagtcattggtcagattctctcccacagcctcagaaggaaccagtgctgcctgcaccttgatctcagacttgtggcctccagaattgtgagacaatacatttctgttgtttcagacacccggtctggggcactttgttattgcagtcctagctaattaatatatcagtcataccagtgtctgttttttttgttgtttttttctttttctttttttttctttgagacagagtctcactctgtcacccaggctgaagtgcagtggcacaatcttggctcactgcaacctctgcctcccgggttcaagtgattctcctgcctcagcctcctgagtagctggaattacaggtgccctccaaccacgcctgactaaattttgtatttttaatagagacgaggtttcactatgttggccaggctggtctcgaactcctgacctcaagtgatctgccggcgtcggcctcccaaaagtgttgggattacaggcatgaaccagcctgctgtctgttgatgactatctgaacatacatytccagtccttgggtcctactactggcmccaagccaagagcctttagaagcccatctatgaggcccatgtctagtcaaggggaaaaagtagcatcccggccgggcgcggtggctcatgcctgtaatcccagcactttgggaagccgaggcaggcggatcacaaggtgaggagatcgagaccatcttagccaacatggtgaaactcatctctactaaaaatacaaaaattagctgggtgtggtggtgcccacctgtaatccccgctacttgagaggctgaggcaggggaatcacatgatcccaggaggtggaggttgcggtgagctcgcatgatcccaggaggcggaggctgcagtgaactgagattgtgccactgcactccagcctggagatagagcaagactccatctcaaaaaaaaaaaaaaaaagtagcatcccatcataggtggatgtgcaatttccttccaacacagctgcctactctaccattgccatctaccacctccccagtagaccaggttcagttgaacaaackcaaggttacacacccaattctccaagagggtctsttggactttctctcacttgcccgttactgggtggtagtgagaaacacacaacaaaccaacaactgtctccagaggaaaccctgttctcttctttctcagtgtcaacccttactcatccccaaaagaagtgatagatacaggaccccaaaactggttttgaattggtccctttgctagttccatttggctgatctgggtgatgtcgctgtgacaggcaaccccctcaacaaccccctcaacaacctcaatggcttaacacaacacaagtgtgtttcttactcatgttgtgtgtctggcattgggggagaggggctacttcttcacatttgctccaccatttttgtgacaggacaatggacgatggggaattatgcaccgggtcttaaatcttctccccatgaacgacacacataactcacttcttatgtttcattggccaaagcatacatagtccactgcatgtacattttacctttaaaaaaatctccgtaaataatattaaatatgtgactcttgttaatgatttacatgcaagggtgtttaagggtaaatggatgaatagctttggctcacttggaaatgcatcaaaaaatcagatggagccaggcgcggtggctcatgcctgtaatcccggcactttgggaggccgaggcaggtggrtcacttgacgtcaggagttcgagaccagcctgggctacatggtgaaaccccatctctactaaaaatacaaaaattagccagatgtggtggcgggtgcctgtaatcccagctactcggcaggttgaggcagaagaatcgcttgaacctgggaggtgtaggtcggggtgagccaagatcacgccactgcactccagcctgggcaaaagagtgagactccgtctcaaaaaataataataggccaggcgcggtggctcatgcctgtaatcccagcactttgggaggccaaggcgggcggatcacctgaagtcgggagttcgagaccmgcctgaccaacatggagaaactccatctctactaaaaatataaaattagcgaggcgtggtggtgcatgcctgtaatcccagctactcgggaggctgaggcaggaaaaacgcttgaacccgggaggcggaggttgcagtgagccaagatcgtgccattgtactccaacctgggcaagaaaagcaaagctccgtctcaaaaacaaaaacaaaacaaaacaaaataataataaaaaaaataagatggggccaggtgcggtggctcatgcctgtaatcccagcactttgagaaactaagggaggaggattgtttgagcccaggagtttgagatcagcctcrgaaacacagtagaaccccatctctacaaaacattaaaaaataaattagctaggcatggtggtgtttgcctgtagttccagttatttgggaggctgaggtgggaggatggcttgagcctaggaggtcaaggttgcagtgagctgtgattgtgccagtgcactccagcctgctgacagagcaagaccgtgtctccagaaaaaaagaaagaaagaaaaaaaaaatggacataacaaagacagcaggatagatgtgtgataaaatatggtaaaacgytagcagttgtagaatctaggtgttggataagaaagtatttggtatacaatccttttgactattaaaatttggcggggcggggaatgaaaaaataaataaagagaaaggaagcttgtcttgccagtgttgaccacataacttcaccctagaaggggattaattcaactctcagcaccttaggtccaaaaagacaccaaccgccccccgtccaaagttattaaataaataaaaacatttgccacccaactctggtgactatttscagttactcccaggctgtggaccacctgtcgagatggagaagtccttctgaggctatccaaacacggaccaggccatgagaccccgatgaccatccctgaattttttcgagagtcagtcaaccgatttggaacttatccagccctcgcatccaagaatggcaaaaagtgggaaattctgaatttcaaccagtactatgaggcttgtcggaaggctgcaaaatccttgatcaaggtaagattcattcattcattctcctttgttcaaccattcattctgaataggtaacasacatacatacatgtggtacaaaattcacaaggcaccaaaagatacaaaggttaattggcgaaaatttccctctgattcatgagcctcagccactcagttcctctctgtggaagcggtcaccattgtcagttttttgtgtgtccttttgggaaataaattatgcataaatataaaatgaaatttttatatatgcaaattttttacacacataatagcctactacacccatggttctgcatcttgcatttgtccctaacatactatctctatgtttttgttagttgctgctgcataacaaattatcccaaaatatagtgacttgaaatgacaaacatttatcatctcacagtttctgtggattgagaatttaggagctactttgaaattgggttcttctggctccaggtctctcatgaggttgcagccaagctatcagctggggctatctcatctgaaggctcaactggggctggaggcttcacttccaagcttacttacctagatgactggttgttggcaggaagtctcagctcctcattccatggccttctccacagaattgcttgagtgtcttcacggcatggttgccagtcacccctagaatgaatgaagcaaaagaaagagggaacaaggctggggtcagtggctcatgtctgtaatcctagtgctttgggacatcgaggcaggaggatcactgagcccaggagttcaagaccagcctgggtaacatagtgagaccccagtctcaatgaaaaatttaaaaagtagccagatgcagtggcacatgcctgtagtcccagctatcaggaggctgaggtgggaggatcacttgagcctcggaggtcgaggctgcaatgacctgtgattgcaccattgcactctagctgggcaacagagtgagatggtgtcataaagaaaaaaaaaaaaaaagagaaccatgtgcttgggctgggtttcttcttgggggccccaccttcatactatgttgctgtggctagttcatctctcctgaaagatggtctcctttagccatgttcttagttccgtggagttaaaggtccccctcctcccgtaaatcttggacacctgactgagcacggtggctcatgcctgtaatcccagcactttgggaggccaaggtgggcggatcaaggtcaagaggtcaagagtttgagaccagcctggcccacatggtgaaaccccatctacactaaaaatacaaaaattagccaggtgtggtggtgcacacctgtaatcccagctactcaggaagctgaggcaggagaatcgcttgaacccgggaggcagaggttgcagtgagccgagattgtgccactgcactccagcctgggtgaaactccatctcaaaaaacaaacaaacaaacaaaacttggagaccgaagtagaaacaaaaccaaaaataaaaacaaacaaaactacttggagacccaagtagaaattagtcggtgtaactaggcattaataaaaacacactctgtccacaataaagccagccttttggttactgaaatacttggcatctcattctgaaggaccagcaggcaaatgccttccaaatggttccttttcccccaagaacagcagatcattgccagccgtgatcccgtatgactaaaagagccaacaacgttggttggcagtacccagaacaaagagggagttttcccctaaggatgctcacttttgtttctgagtttcctggttcattctcacccacattcagaacaagtctgtacctttacatgtgcaacttttttttttttttttttttttagacagagtctcactctgttgcccaggctggagtgcagtggcacgatcttggctcactgcagcctcagcctccaggttcaagcaattctcctgcctcagcttcccaagtagctgggactacaggcaggtgctgccacgcccggctaattttttgtatatttagtagagacggggtttcatcttgtgggccaggctggtctcgaacttctgacctgaagagatccacgtgccttggcctcccaaagtgctgggattacaggtgtgagccaccacacctggcctcaagagatccacccacctcggcctcccaaagtgctgggattacaggcgtgagccaccacacctggcctcaagagatccacctacctcggcctcccaaagtgctgggattacaggcgtgagccaccacgcctgtaattttttttaaattagactcagtggagcaggcccatagtcccagctactcgggagggtgaggcgggaggattgctggagcctgggaagttgaagctgcagtgagctatgatcacccactgcactccagcctgggtgacagagcgagacaaaaaataataataataaaataaaataaaataaaataaattcacacctttcaagatagctattctttaaaaaatagcaaaacacaacacgtgttggggaggatatggagaagctggaacccttgtgcagtgctggtggaaatgtaaaatggtgccgccactgtggaaaagtctggcgatttctaaaaaaagaaaaaatgtaaacagagaattgccatatgattcagcagtctcactcctggatatttamcaaaaaaaaaaaaaaaaaaggaaagccagagacatgaagagttatttgtagactcagggtcatagcggcgttattcacaagagacagagggtggaagcagcccgtgtgtccatcaatggaagaatggataaacacgatgtggtccgcccatacaagggaatatgattcagccacaaaaaggaaggaaattctgacacatgctacaacatggatgaatcttgaggacatcatactcggtgaaataagccagacacaaaagggcaaatcccgtatggtttctttcctaggaggtccctagagtcgttagactcatagagacagaaagtagaatgggaggtgccaggggctggggaaggggatagagagtgagtgttttatacagagagtttcagtttagaaagaggagaaagttctagagatgaacagtggtgacggttgtacaaccatgtggatgtgtttaatgccactaaactacactcttaaaaatggtcaaaacgggctgcgtgtggtggattacaggcgtgagcactttgggaggctgaggcgggaggattgcttgaggtcaggggttcgagaccagcctggccaacatggtgaaacgctgactctactaaaaaaacaaaaattagccaggcgtggtggcgcgtgtctgtaattccagctacttcggaggctgaggcaggagaatcgcttgaacccaggagacggaggttgcagtgagccgagatcgcactgctggactccagccttggcaacagagtgagactctgtctcaaaaaaaaaaaaaaaagaaaatggtaaaatccatgttatagatattttaccacaataaatgaaacaaaacataaaaataaaaataataaatggtgtgttatgtagagggaggtaaacaaacctcccgtagtcataaaaattaaaaatattacacctcagattttaggctcaatgctgtctcccaccccgtgtggctacttttgttttgttttgaaacagggtctcaatctgttgcccaggatggagtgcagtggtgcaatcatagctcactgcagcctcgaactctagggctcaagtgatcctcctgcctcagctacccaagtagccgggacgacaagtgtgtaccaccatgcccggcgaacttttccactttttttgtaaagacaggggtctcactgtgttgcccaggctggtctcgaacttctggcctcaagcaattctcccacctcaacctcccaaagtgctaggattacaggtgtgagccactgcgcctggcctccatgtgactacctttgattctgtcgtcacatatcctaatgatataacatctctgtgtttatgttttgtttttctgtttgytttttccttcccagctgggyttggagcgtttccacggagttggtatcctggggtttaactctgcagagtggtttatcactgctgttggtgccatcctagccrggtaaggtcattggcttggttcatggtgagggttaaggagccgctaccctgggcctgggacccctgggcttgtccagtgtgagatgcaaacaggaattttggatgaacgccctagttagcaggcaggatagatgcacgaacaaatcattctgatcacaggtcatacgcaataacacccattagactagcagtctcagacctctcgattttcttcagctgaagaactttttgcagacaaaataataattgtagatagcatttagaggtttctgattatgtgcagaagcattgtgctccacgtgtatgatcctgtaaaacctcacgacagcaatgtgaagtgggtcctatcatcccctatctacagatgaggaaactgaggctcacacagccagtgggcagccttgaagtcttgggctcatgcgatcctcccaactcggcctccagggtaactgggactatgagcacacaccaccacacccagctaattttttttttttttttttttttgaggacggagtctcgctctgtcgcccaggccggactgcggactgcagtggcgcaatctcggctcactgcaagctccgcttcccgggttcacgccattctcctgcctcaggctcccgagtagctgggactacaggcgcccgccaccgcgcccggctaattttttgtatttttagtagagacggggtttcaccttgttagccaggatggtctcgatctcctgacctcatgatccacccgcctcggcctcccaatttttttttttttttttttgtagagatggtttcttgctatgttgcccaggctgtaatcgtgaaaaaaacaaaagtaaaaataaaatactgatttcttcttgagcttgtaattctacctttgggagttttacttaaagaaacaaaaccaaaacatgaatatattttggcttatgcacaaagatacttcttggaagtgttattagtgatggcaaaaagtcggggacaacctaagtgtcccacagctgtggattaaaccatgagatgccttctggatgggattctcggtaatattttgaaatgatggctctgaagagcacattttaagcatttttgatgtcagaggtgacaaagcaggtatcaaaatctttatacactgtatggttacaactatgcttaaaatttaaatatcaggccgggtgtggtggctcacgcctgtaatcccagcactgtgggaggccaaggcaggcggatcacaaggtcaggagatccagaccatcctggctaacatgctgaaaccccatctctactaaaaataccaaaaaaatcagccaggcgtggtggcaggtgcctgttagtcccagctacgygggaggctgaggcaggagaatggcgtgaacccaggaggccgagcctgcagtgagccgagatcgcgccactgcactccagcctgggcgacagagcgagactccatctcaaaaaaacaaaacaaaacaaaaaaatttaaaataccaaccattaatataccaattattgctggtcactcttacctatatgatatcattgactgctcatggtagccctttgaggtaggtgccatcatgatcccaagtaataatgatggtgacgataatctgggaccaatagrggttaagtgtcttccccagaatcatgctgtggttggataaagaccctgagatctgaactcgtttgttcgactcaagattaataataacaacagcaacgacagcagcagcagcagccacggccatgacaaaattgagcggctgggcacagtgactcatgcctgtaatcycagcactttgggaggctgagatgggaagactgccttagcccaagagttcaagaccagcctggacaacatcgcaagattctgtctctaaaaaataaaataaaagtgtttttaaaattagccaggcatggtggtgtgtgcctgtagtcccaactacttgggaggcagaggtgggaggatggcttcagcccaagaagttgagactgcagtgaattatgatcataccactgcactccagcctgggcaacagagtgagaccctgtctggaaaataaaagtaaagaaaagaaaagaaaagaaaaggaaaagaaaaaagaaaagaaggaaaagaaaaaagaaaagaaaagaaggaaggaaggaaaagaaaagagaaaagagagagaaaaaaattgagggtggtgactagaaataaatattaacattagttatatctcatcatcgagactaacaccaccctaatatgttatattctattttccaaatttttatgagcatatactacccctgtcttacagtgagttgaaatatatatatattttgaggccgggtgcagtggctcatgcctgtaattccaacactttgggagtggaacacctgaggtcgggagtttgagaccagcctgaccagcatgtagaaactctatctctactaaaaaaaaccccamaaaattagccaggcgtagtggcacatgcctgtaatcccagctacttggagggctgaggcaggagaatcacttgaacccgggacgcagaggttgcagtgagccgagatcatgccattgcaatccagcttgggcaacaagagcaaaactccgtctcaaaaagagagagagagagagagagagagagagagagagagagaaaattattattatatatataaaatatataatacatataataaataatatataatacatataataatatataatatattatattatctatatagagagaggtggagtctcactctgttgcccaggctgcagtgcagtggtgtgatcttggctcactgcaacatctgcctcccgggttcaagtgattctcctgcctcagcctcccaagtagctgggactacaggcgtgcgccaccatggctggctaaattttgtatttttggtaaagatggggtttctccatgttggccaggctggtctcaaactcctgacctcaggtaatccacctgcctcagcctcccaaagtgctgggattacaggtgtgagccactgtgcccagcccagaataaattttaatgaagagatctgtccccattttaggactgaatggtaagacagtgtcatgcagtgattgggctctggtgccacatcagacccaaattcaaatcttgggttgtctgctattttgtattctgtatgaatgagcaggaaagcacacatctccatgcctcacagggctgttataaagattcaataagaggatgcttcataaacccttagcacagtgcttagcaaatagtatgtgcttaagaatggtgatgagagtaaccatctcaaataattataatgtgcctcattccctgccatattaaaagcacaacaactagatcaacagagcagagagcccagaaatagctccatgcatacatggtcactggcttccaacaaaggcagcagagtagttcagtggtgctggaccaactggatatttgtatggaaaaataaatcagccctgatccctacctcacatcatatgcaaaaattaaattgagatggattacagactaaatcatgcaagttaaattctaaagcttctagaaaaagaaaagcacggaatggtttcacaacctgggggtagtcaaagatttcttagacaggayacagagagcaaaaagcataagagaaaaagttgccaaataggactttattagcattaaaaacttctgcttattaaaagacaccaacaagatgaacagttgtcgaacatggtggctcacgcctggaatcccagcactttgggaggcaggggtgggtgggtcactggagtccaggagtttgagaccagcctgggcaacatggtgaaacaccttctctacaaaaaatacaaaaattagccaggtgtggtggtgcatacctgtaatcccagctactcaggaggctgaggcatgagaattgcttgaatccaggaggttgaggttgcagtgagctgagattgcaccactgcaggccagcctgggtgaccgagctagacccygtctcaaaaaaaaaaaaaaaaaaatggtgaacaggcaaactgcatacttggagaaaatattcttaaaactcgaatttctaacaaaggactggtatctaagatagataaagaaattctgtaactcagtaataaaaaggcaaaaaaaaaaaaaattgaaaggggcaaaagatttcaacagaaatgccacaaaggaaagtagccaaaaggcacatgtaaaggtgctcaatgtcattatccattgggaaatgcaaattaaaagcaaaagaggatgcaccctgcaagcacaaaaggctgtgaatgatgggaacagaggctgagtcaggagttcagatcctaggtctaacacctacttgctgtgtaatcttgagtgacttcactgctgggcccctgtttttctcatctataaaatgcggtgttctaagtgttccatgacctgttgtcatagtgacatcataggagctgtcacttatcatcattgtcatttttgttgtcttcatcattgttaagttggggaggaagggaagctggtgctgtggctgcaaacttaagaacttgcctgcaaacctttcctctcttttgaccttccagaccattctgcctttaaggtgtgtgtggatgcacacacgaatttgttttcttttcccaggggtctttgtgttggtatttatgccaccaactctgccgaggyttgtcaatatgtcatcactcatgccaragtgaacatcttgctggttgagaatgatcaacagttacagaaaatcctttcggtaaacccctacccagcactgcctgccaaagtcacccaggggtacctcagggctctgggcaggtgttctttttttcccaggtaaattctaatgataagatagggccatgcatctgttcagcgagtcctccatgacctcattagtatatgtggtgaagctatttttggagaagcagactgaaatagaggagtttgatttccaattcatattaacttagtttaatactcagcctccatttttttttttttttcgagacagggtctcactctgtccccaggctggagtgcaatgtcgtgattgtagctcactgtagccttgaactcctggtctcaactgatccttctgcctcagtcctccaagtagctgggactacgagcgtgtaccaccatgtcaggctaactttttttttttccgagacagagtctcgctctgtcgcccaagctggagtgcagtgggctgaactcggctcactgcaagctctgcctcctgggttcatgccattctcctgcctcagcctcccaagtagctgggactacaagtgcccaccatcacgcctggctaatttttttgtatgttttagtagaaacggggtttcaccgtgttagccaggatggtcttgatctcctgacctcgtgatccgcccgccttggcctcccaaagtgctgggattacaggcgtgagccaccgccccgagcccgggctaacttttaaaacattttttgggccaggtgtggtggttcatgcttgtaatccgggcactttgggaggccaaggcaggcagaacacctgaggtcaggagtttgagaccagtgtggccaacatggtgaaactccatctctaccaaaaaatacaaaatttagccgggtgtggtggcatgcacctgtagtcccagctactggggaggctgaggctgaggtggcaggatcgcttgaacctgggaggtggaggttgcagtgagccaagactgagccactgcactccagcctgggtgacagagagagaccctgtctcaaaacaaacaaacaaacaaaaaccattttttttttgtagagacagagtcttgctatgttgcccaggctgctgttgaacttctggcctcaattgatcttcctgcctcagcctcccaaagtgctgggattataggcatgagcccccatgcccaaccttaagcccccacttaagtaaaagtattaatatatttatgtattattttatatacatcccactgctaattattttttcttttagaagtgtgatgatttcaagcccatgctactatataattttcttcatttcttgtcattgtcttcatttctagatgcttttgttgttctcttctatttcttgcctaagttctatcccttcctgtttcatttttttctagtgtcctgctgtctcttccctgagtgcttgtatgtttgctttgtgttcttcctttctagctgtgtttgcttcattacatttttagttttatgttggaatgtttggttacaattttctttttttttctttttttttttttgagacagagtctcgctctgtcgcccaggttggagtgcagtggcacaatctcagctcactgcaacctctgcctcccaggttcacgtcattctcctgcctcagcctcccgagtagctgggactacaggtgcctgccaccatgtccagctaattttttgtatttttttagtagagacagggtttcaccatgttagccaggatggtctcgatctcctgacctcgtgatctgcccgcctcggtctcccaaagtgctgggattacaggcatgagatactgcacctggccttggttacaattttcttttgcattgtgttgaaattatccagtgagttttatttgtgtacagtgaaatttagctgctgtcttacgtttttttttttttttcattgtagtgtctttgtatggctattgtcgaaactttaaatttcctacatgtttgaatgagctgcagtttgctgtatcagcttttggcaggagggtcctggagaggaggggagtccctgggaggggtgagcctagatggctaggttcatttcagctcaaggaccactgtgactgtttcttgaatacatgatttcatgactctgagtcactcatttcttcactttttcacatctctggagtcgagatgtgtcttttcattgatggcattctctgatcactactggccatatgttttctcacattttattctctccgaaatttgggtacagtttccagattcaatgaaatcctagctagactcagtgaaatacaacactttctcctgcctggcttcctttgactcctaattcctgacttggttcaggaaggacagacctccacctctggcctagagcttttaaaaattcttttcttttttctttttcttttcttttctttttttgtttgtttttttctttttttgagactgtctcactttgtcgtccagtctggagagcagtggcgccatcttggctcactgcaacctccacctcccaggttcaagtgattctcatgcttcagtctcccaagtagctgggactacaggtgcacaccaccacaccgggctaatttttgcattttttgtcaagactggatttcgccatgttagccagactgctcttgaactcctggcctcaagtgatccaatggccttggcctcccaaagtgctgggattacaggcatgaaccactgctcacaaaattactttcttaagtgatgcatcggtggttcccaaaactcatgtcatacctgtttgtcctcttcctagcagaacacactatggggtgggtgctggtgggtgggtggggtccttcttccagctgggaatgctggcttaatttgagttttccataactggaaaatgccacatacacaaccttcccytctacacccacctggctgctgtggatttctgtcctggttctagcaggtccagcattaagtgaataaagcaatatctgaattatttctgactcctagtttcattgaaggtgaagtctgtggaggatttattgttccagttgctaggtctagaagattcaaaaccaggttcctgacatgcttctcccaaattggatgcccagctccacttggagatctttatttgggggagtaatcacagatcctcctctgcttataatcctctaattctctagcggttttctgttggagttaaataaactccaaactcctcatctttgcctccaaggctccgctgatctgggcctcaccattctttcatgccccctcccctatcatactctcttgggtccccactctggccatcctggactttttgtatccctcagacatcccaagctgttgcctgccccaggctccttgaatgtctgyttcttcttctctctggaaaactcctgtccagctgctatacgggcttctgccatcttttctctccaatgcatgccagaggcgtggttatgattagcaaaatggatgttgcaagtaactttttcattggattggctagaagtgtcatagagagaccccatyccgctttctttggcatgaacagagtataaaaatctcgcaggggccgggcgtggtggctcatgcctgtaatcccagcactttgggaggctgaggtgggcggatcacgaggtcaggagatcgagaccatcctggctaacacagtgaaaccccatctctactaaaactacaaaaaattagccaagcatggtggcgggcgcctgtagtcccagctactcgggaggctgaggcaggagaatggcatgaacccaggaggcggagcttggagtgagctgagatagcgccactgcactctagcctaggtgactgagtgagactccgtctcaaaaaaaaaaaaaaagaaagaaagaaaagaaaaaagaatcccgcaggtcacctgaaccttaccgtgctaggtatgggtagagggctctgcacttgtccaggttccagccaacttcatgaaggatttttattgcctgactccgagtaaaaggttagctaaatctgggctgcaaggtgcaaagtcctggaaaaggaagagccatgagggacttcttttagctcatcaaccaagatccacaattctgtgtagcataatttggtcagagatgtgttgtctcgggcagactattgtcatcctctaccgacactgttggaagctactgatatggactacaaagaatccaggagtcctgaaaccaagtcatttggagtcagtcaagaccaatagcagcattttatagtgtgggcaggggaagaaaagaggctggaggctgggcacagtggctcacgcctgtaatcccagcactttgggaggccgaggcggggggatcacctggggtcaggagttcgagaccagcctggccaatacggtgaaaccccggctctactaaaaatacaaaaattagctgggcatggtggcacatgcctgcaatcccagatactcaggaggctgaggtgggagaatggcttcaacccgggaggcggaggttgcagtgagccgagattgggccaatgcactccagcctgggcgacagagcaagactgtgtctcaaaaaaaaaaaaagaggctagagttgctggagagagcttacttaggacatctaacccagctttagtctttcccagggctgggttgccatgaagcccacagggaactttytttcagattccacagagcagcctagagcccctaaaagcgatcatccagtacagactrccaatgaagaagaacaacaacttgtactctgtaagtgtgggaggtgggcactggggaaaggggagggcggggccttgcaagaaaagtgggcgtggcctaagtggaaggtgagcagagggaggaggtcggacctggcaagggtgggaactctcaaaggaagtaggtggggactctcaaaggaagtgaaaggtgaggaaaggaagtgggtggggccttgtgaggaaagtgggtgtgacctttcaaaggacgtgaaatgtgagcagagggagggggtgtgaccttacaagggaagtgggtgtggcctttcaaagaaagtgggaggtaagcagagatggaatggggcctcacaaatgtggtaggtgggggtttgcaaagggatgtgggtggggcttcataaatgtagtgggtggggctttgcaaagggaagtggatgtggcctttgcaaagggaaatgggaggtgagcaatgcgtgggggcctagcaaaaggacgtaggcgggacctttgggacgcatttttcccttctggcatgaagggactgattaatgaacagtgtctgttctggctaattactgctgggcaacaaatcaccaccaaaactggtggctaaaaaaaatcagtcattttgttattaattttttcccaagaacattaagataattaaacaatatactaaaaagttgaaaattatgttaaaactaacaacattaagtttaaatattttatttatacccaagccaaaatttgttataacaatgactaagacaaccaattagaattgcagacttctcaggagatcgagaccatcctggtcaacatggtgaaacaccgtctctactaaaaatacaaaaattagctgggcatggtggtacgtgcctgtagtcccagctactcaggaggttgaggcaggagaatcgcttgaacccgggaggcggaggttccagtgagccgagatcacaccactgcactccagcctggcaacagagtgagactctgtctcaaaaaaaaaaaaaaaaaaaggccgggcgccagtggctcacacctgtaatcccagcactttgggaggccgaggcaggcggatcacgaggtcagaagatcgagaccatcctggctaacacggtgaaaccccgtctctattgaaaatacaaaaaaattatccaggcgtggtggtgggcgcctgtagtcccagctactcgggaggctgagacaggagaatggcgtgaacccaggaggcggagcttgcagtgagctgagatcgcgccactgcactccagcctgggcaacagagcaagactccgtctcaaaaaaaaaaaaaaaaaaaaaattacaaactttttagaggttcaaagtgaccactacagcaacagtcttaagtctcggataacttaaaagactactttgttagcaataacacttacagcagggtttctcaacctccttgctgttgacatttggggcaggtaattctctaaggagctgtccgacgccctgtaggatgttgagctgcattgctggcctccactcactggatgccaggaatatatcccctgcctcccacttgaaacaaccaaaagtgtctccagacactgcctaatataccctggtggggggagggtgggcggtggtggagtagtatcacccctggttgaagacgctaatttataggggagagtcacatagaagggcatctactcctctgcaagggagagtagaacctaccattttaagattctgtttaggctgggcacagtagctcatgcctgtaattgggaggctgaggtggacaaataacctgaggtcaagagttcgagactagcctggccaacatggagaaaccctgtctctactaaaaatacaaataataataataataataataataataataataataataataatcgcccaagcacagtggctcacacctgtaatcccagcactttgggaggctgaggcgggcagatcatgaggtcaggaggtacagaccatcctggccaacatggtgaaaccccgtctctactaaaaaatacaaaaaattagctgggcatggtggcatgcgcctgtagtcccagctgctcaggaggctgaggcaggggaatcacttgaacccgggaagcggaggttgcagtgagccgagatagtgccactgcactcaagcctggcgaaagagcgagactccatctaaaaaaaaaaaggctgggtgtggtggctcatgcctgtaatcccagcactttgggaagccgaggtgggtggataacctgaggtcaggagttcgagaccatcctgaccaatatggtgaaaccccacctctactaaaaatacaaaaattagccgggcgtggtggcacgcacctgtagtctcagctactcaggaggctgagagaggagaatcacttgatcccaagaggcagaggttgcagtgagccaagagcagtgagcggagatcacgccactgcactccagcctgggcgacagagcaagactctgtctccaaataaacaaataaataaaataaaatacaaaaaaaaaaaaaaaaaacagccaggcgtggtggtgcatgcctgtccaagctactcgggaggctaaagaggatcacttgaacctgggaggtggaggttgcagtgagctgagatcacgccattgcactccagcctgggtgacagagcaagactcttgtctcaaaagaaaaaagaaagaaagaaagaaaaagatttagtttaggacccagaaatgagcaaaaacgaatgagactgagaaagtggactgtgacatttgggaaggaaaatggccgagtaagacaatgaactgtgccagttgtgatgcttggcatctgtgtgcccaacagactgaggaccaacccagatctccaagacaggggattggattggaccagcatgggtctggtgcccatcccaatccagtcatttgtggctgtggaagccgggggtcttctaccggcctttgaaggaacaccctttgtagggagacctaggggcatctctgagaaaggacaggttcccccagagggcttgtgtgtgctcttcctctcacccttgccctaccttgttacagattatctgggcaaagggctttgcctgctcagatgaagccagcatcaccctgggcaggtttcaggcaacactggccatctgtagaggactttgaggggccttttttttttttttttgagatggagtttcactctgttgcccaggctggagtgcagtggcgtgatcttggctcactgcaatctccacctccccatttcaagcgattctcctgcctcagcatcctgaggagctgggattacaggcgcctgccaccacacccggctaatttttgtatttttagtagagatggggtttcaccatgctggccatgttggtcttgaactcctgacctcgtgatccgcccacctcagcctcccagtgctgggattacaggtgtgagccaccgtgcctggccgaggggcctccatctttaagtcagcgcatcaccctcatccagtgctttgttgggggttcaatggtagaatttctgcagatcccatgtgatgctcagtcgatacaacccaagagttcactttgcggcaccgaattctgtcatagttaagagcacaggctctggagtcagaccttgggtttgaatgctagctcctctcttcacttgccttaagtaatctgccttgggcaagtaatctaccacccctgagcctcagcttcttcacctgccagagtgaggcaatgcatcaattatcaataaggatgcctttggtcgtaagtgacaaaagtctgaccccaaatggcttaagcaacaaacaaacaaaaagataatctgttggaccatgcaactacagttcagggcgtggatttcaggcatggctggaaccaggggctcaaagaatgtgcccaggctctattttcctttctctatttcttggctccgctccagccttgctttctcacatagtcctgagatggttcagcagctcytagagctacatcttgactcattcacatacacagtctgtgtctcagaattcccaggtaaagtcttcatcttcattatgattggaccacttgaggtcacatgtccagacttgatccaatcaccataacccaggctgatagaacagtttgagccaattagggttgacttccagatctgtgggtgaagtcagccccatccaattggtgactaagaagtagagtggggagtggaatttgggaaggcagcgaacaaataatacctaactccgtagaacacttaccacctgccaactactattctgagcactttgcatatattaactctcttactgcttagaacaacccaaggagttgcgtcctgacatcattcccattttacaaatgaggaaactgaggcacagggagcttaagtggcttggtgacgctgcgaggaagtggcagaactggaagcagagatcttgggacttttgtaagaggtgccaggactggcacatcctaagcccttccacctgctgaggatcattctttaggaaaagctgataggacgaggtctggctgggtgagaggactcccgactgccttctcatcctccgcttgtcttttctgtccacagtgggatgatttcatggaacttggcagaagtatccctgacacccaactggagcaggtcatcgagagccagaaggcgaatcaatgcgcagtgctcatctacacttcagggaccacaggcatacccaagggagtgatgctcagtcatgacaacgtacgccaaagtccctttgctctggagtggtggcctttgggctgtttctcttgttggcttccaggggcagggtggcattccagggtctagtacgcagtgtggctccttcaccattgggggttagagagtagcgtagttgcttcactagggggcagcagagtgcagtgattgagatcaaggaatgctggccatgtcaaaagcagaaaaatgtctggcagggtatgcacccagcagacaatgattcctctgtgtgagtcaggaaggttgtgtgtgtgtgtgtgtgtgtgtgtgtgtgtgtgtgtgtgtgtgtgtgtgttttgagatggggtctccctctgtcgcccaggctggagtgcagtggcgcaatcttggctcactgcaacctctgcctccgttcaagtgattttcctgcctcagcctcccaggtagctgggattacaggcacccgccaccatgcctggctaatttttgtatgtttattagagacagggtttcaccaagttggccaggctggtcttgaactcctgacctcaggtgatccaccgccttggcctcccaaagtgctgggattacaggcatgagccaccacgcccagcctactttatttttcagttgtgtgtgtgttttgttttgttttgctttttgagaccgagtctggctctgtgccccaggctggagtacagtggcactccactcactgcaaccactgcctcctgggttcaagcaattctcgtgcctcagcctcctgagtatctgggactacaagccagtgccaccacatccaactaattttttgtattttgggtagagatggagtttcaccacgttgaccaggctggtctcaaactcctgacctcaagtgatctgcctgcctcggcctcccaaagtgttgggattacaggcgtgagccacagcacctggtctgtttttacactgtttttagagatgggttcttaccatgttgcccaggctggagtgcagtgactactcacaggcacaatcatcatgcacttaagcttcagactcaacaggctcaagtgatccttctgcctcagcctcccaagtagctgggtctacaggtgcatgcaatcacacctggcctgctggtttttaaatgaagaatttctataaaagcattcttataaatgcttccctgccccccctcagcctagggtaatagttaccagcacacactggtgtctgaccacctcagtgttggaatcctggctttgctacttgtaagtaaccatgtaagctggtgtgacattggtcatatgacatcaccaaactgtgtgtcagtttgcccaactgtaaaatggggagagtagagggcccaattctggcagagggcctggcccatggaaggtcagcaatggaagattgcaaargtcagcctccactcccttaatacactgtctcagctagtgctgtatagcaaggtgtggagctaggatcatccccctgggtctggaggtcccgatcctagatccacaccctggaaatcttctctgaatttctcattttaacatgaatccaaatcttttgccaacactgtctccttcagcagaactcctttcctcctcctgcatcttagctcaaggcctcttagaagttttctgatttttctacaactatggtttttactctcccacactgtctgtctgagcaatatcacgggcccaggactaaggtctatatgtaaattaaaacttggcttcctgtaaaatttgatgcataaatatattttgctataacaacaaggaaagcaggcttcaagtttggcaataaatcacgggagtacaaattaaaagttcagacattacagaagcccttggactcaattgtatgatgcatgatagagaaaaattatttttggcccagtctccatcatcgctcccctggacctgtgtggttgcttccaccccatcccggttacccgcctcccacccaactcccaccctcacccccacccccagtctatcctctctacagccaccagagagtgcctgtgagcacctgagtcaagtcccaatcctcctctgtctgcagccctccatggctcccacttccctccaggtaaaagcccaagtctcctgaggcccacaaggcactgcaagcctagccccatctcccttctcctctcctctcctccctctctcccccttgctcactctgttctagccacatggtcctccttgctgttcctccaacacaccagacacgtcctgcctcttggtctttgcatgagctccgtgggaagtatttttccacacagcttgttccctcccctccttcgggtgggtctctgctcagtgtcacttcctcagtgaagccctccctaacttccatgtttgaaatagcaaacaataaaccaccccattactacctaattcccatttggctactttttttcttccttagaaaattttgacactgtcatattatatgctcatttgtttatcaggaacatcagctccttgaggtcaggggttttctgtcttattcactactgtaactgcagtgcctgatgagcaggaggactcaatccacttttgggaaatgaatgaatgagggaaatctgattaaacaggatattcccctctatgctggctagtatttatgctcctagtggctgcatgtgtggtaagacattctcctagcacaggcattatgagcatagatcctggagcaagactgcccactttttaaaggggctggtttttttcttattaagttccttatagattctgaatattagtccttttttatttttattttttttgaaacagagtcttgctctgtcatccaggctggagtacagtgacactatcgcggcacactgcaatgtccacctcccaggtttaaacaattctcctgcctcagcctcccaagcagctgggattacaggcacccaccaccacacctggctaatttttgtatttttagaagaggtggggcttcgctatgttgggcaggctggtctcgaactcctgacttcaagtgatccacccacctcagcctcccaaagtgttggaattacaggcgtgagccatggcgcctggccaatattagtcctttaattgatgcacagttgcaaatattttctcctattctgtaggttgtctttactctgttaattgtttcttttgctgtgcagaagctcttaagtcccaattgtccatgtttggttttgttgtatttgtttttgtggtcttagtcataaattctctgcctagcccaatgtccagaagaatttttcctaggttttcttctagtttcttcattcttctgcacatggctagccagttttcccagcaccacttagtgaataggatgtccttccccattgtttatttttgttgactttgtcaaaaatcagttggttgtgtgtggcttaatttttgagttctctattctgttccattgatctctgtgcctatttttgtaccagtaccatgctgttttagttactatagccttgtagtataatttgaagtcagataatgtgatgcctctagctgtgttctttttgcttaggattgctctatttgggctttctggttccatataaattttagaattgttttatataattatgtgaaaaatcatattggtaatttgataggaattgtgatgaatctgtagattgctttgggcagtatggtcatgttaacaatgttgattcttcctgtcaatgagcatggaatgcttttccatttgtgtcatctgtgatttctttcatcaatgttttgaaaagttattctcgtagaagtctttcatctccttggttaaatgtgtctgtgggtattttattttttgtgtagctactgtaaatgggattgaattcttgatttggttttcaactttaagaatattggtatatagaaatgctactgatttttgtacattgattttgtatcctgaaactttattgaagtcatttatctaggagtgttttggaggaatctttagggttttctagatgtagaatcatatcattggtgaacagagataatttgacttcctctgttcctattttcctattcatacatcttttatttcttgcttgtgcctgattgctctggctaggacttctagtactatgttgaatagcagtggtgaaagtggatatccttgtcttgtttcagttcttagagggaatgcttccaacttttccccttcagtatgatgtttgctgcaggtttgtcatagacagctcttattattttggggtatattccttgatgcctagtttgttgagggttcttatcataaagaatgttggattttgtcaaatgctttttctgcagccattgagatgatcatatggcttttgattttaattctgtgtatgtgatgaatcacatttattgatttgtgtatgttgaaccatccttgcatcccaggaataaagcccacttaaaaagtatctttattttcatttgtttcaaagattgtttttattgcttctttaatttgtttacccaaaagtcattaaggagcaagttgcttagtttccatgtatttgtgtggttttgagggttcctcttggtattgatttctaattgtattccactgtggtctgagaagatgcttggtatgattttgatttttttaaatttattaagactttcattgtggcctagcatgtggttaatcttagagaacgttccatgtgcagatgagaaaaatgtatattcagaggccactgggtagagtattctgaagatgtctattaggtccatttggtcaactgtccaatttagtctagtatttctttattttctgcctcaatgttctgtctgtcagtggggtgttgaagtccctcacaattattgtatggctatctcttaagtctagtagtacttgtcttataaatctgggggctctgatgttgggagggtggttagatcttctggttgaatttaaccctttatcattatataatgcctttctttgtctttttttttttcttaactgtcattagtttacaatctgttttattggataaaacagtagcaccctctcatcttatttgttttctgtttgcatgatagatctttctccatccctttactttgagcctctgagtgtcattacatgtgagatgggtctcttgaaggcagcagcaggttgggtcttatttattattattttttatcaaatttgtcactctatgtcttttaagtgctgtatttaggatgtttatgttcaaggttaatattgatatgtgaggttttgttcctgtcatgtgtttttgctttgtattcttgattgtttagttgctttatagggtctgtgggctttgtgcttacatgtacttttatggtagcaagtattgttcttttgttctcatgtttagaactcctttgggcatttcttttcgggctgatctagtgatgacaaattcctttacatttgcttatctgagaaatattttatttcccatttatgaaacttagtttagtgggatataaaattattggctggcatttatttttctttaagaaggctaaaaatgggccctcaatctcttctggcttgtgaggtttctgctaagaaatccactgtacgtctgatggaatttcctttatatgtaatttggcccttttctctagatgcctttaagatttattttttttctacattgaccttggtctgatgactatatgcctcgggggtggccatattgtgtagcatctcacaggagttctctggatttctcatatctagatgttgacctctctggcaagattaggtaaattttcctgtattactccctcaaatatgttttccaagttgcttaatttttcttcttttctctcaggaatgcatttaagtcacaggtttggttgctttacataatcccacatttctcaaatactttgggttttttatttcttttttctttacttttgtctgagttgtttgaaagaccattcttcaagctctgaaattctttcttctgcttggtctagtctaactatatttttaaatttctatagtgaaattttcaattccagaagttcaatttggttttttcttaatatatctatgttgtatttcatatattgaagtgttcttctagtttccttatattggtttccaactttctcttggatctcattaagtttccttccaattcatattttgaattctttatatgtcatttcaaacatttcagtctgatgaggacccattgctagagaactggtgagattctttggaggtgttgaaacactctggctttttctactgccagatttcttgcactgattccttcttatctgagggagctgtcacttcttgtttttgaatcttctattgtttggatggggcttttgtattttttaattctagtttcccttgagggtatggctgtggtgtatgttgtgtgtgattgtatggccttgcttctgagtgcttttgggggccaaaggtctgtatgggttccacggttgtggacagcttctgtgcagtggctaaggtctgtacgggttccatggttgtggacagcttctgtgcagtggctaaggtctgtatgggttccatggttgtggacagcttctatgcagtggctttctcagatgctgcttgttgtaatgatgtaatggacataacagccaacactatctcctgcaggactgagggtgtggaggtctcaggaggcttatctcatgcactgtcaataaacccttccagtagcaagatttttgtttggtggtgcagtgcaggatgcagtccagtagatcgcacttaaaagttagaaccagcaggtaggctggtgccaagtaggcatgcataccctgatggaggtagcaggaagagatcatgatggggtgcactgaggtctcaggggtaggggcagggaatgcaccagctccttgtcctcagccagcaggaatgcagtccgcttctctatcacacccctgtcatggggctcacaatcttctgtttataaaggcttcatcctttagttcctggcagcagtgtggggtgggagggcaggtgggaaatgaccccttctccatgtcttttcccaggcatgggtgctgcccactccagtggtttgtgccacacccacatttcctttgtcccaaggggggctttggtgggctgcrttctcctcctcctttaggggttacccatgccaagggttagatcttcagggatcctgcggccccccagaggctcactggtcccttgtgcttgccaaagtcacagcgcgttgtggggtatgtttgtggggaatctggtggtgcagtgggtcaagggcagagaatccccaggcagggcagtggcaccacaggtgcacaaccagtgtggtgcctgctgtctcagttcaggtctgaggggagtgtgggcatgcctgtgtgaactgaccacctggttctctgtccctgggaagttctctaatcagcaccgatggtgttggcctgggttgcaagggcagaggagctccctgagagtttagtgaccaggatattgtcaaaggcgagtgggaagcaaagaagcactcccacctatcctttccatggggctctgagttcctcaggagctgatctttgacaggcccttgcagctttcctttcctacgccgcagcttcttcctgtgggcactccaagaggtcctgcctctccttcctccattttcagttcaaaacttatccatttaccagtaattttgatcttcttcctgaaaactgacatctgatgtccgttgtcagccatcacgtatcaatacactgttagcaagtggcagattctcattcatatccttctggttccaaaccacaaggctttccacaatagggaagatgacacttgtcagccacgctgagcccaagccacagggctctgggcagggtcatgctgtctgtgggtagcttacaggaccaacatgaggacatcactcttgaactattttttttttttttttttgagacagagtctgctctgtcgctcaggttggagagcagtggcacaatctcgactcactgcaacctctgcctcccaatttcaagcgattcccccacctcagcctcctgagtagcagggattacagacgtgtgccaacacacccatctaatttttgtattattagtagagatggggtttcaccacgttggccaggctggtctcgaactcctgacctcaggtgatccacccgccttggcctcccaaagtgctgggactacaaacatgagccaccacgcttggccatcactcttgaacttcttaacctggtggctgactctcccaacagcaagtggtcccaaagatttgtcagtcccagaatttccacagcatcccttctgctcctttctgtcagtcaaaacaaatcactggaccaattctgtctcaaaggaaagagaaacaaattccacctcagaatgggaggagtagcagagaatctgcagctctgtttaatctaccacatatacataaaatgcttagaacaatgcctggcatacaggaagccatgtcaaggatagctattaatattgtatttggctgggtgcagtggcttatgtatgtaatcccagcactttgggaggccgagacaggaggattgcttgaagccaggattgtttgagagaaggctgggaaacacagcaagacctcatctctacaaaaatgttttaaaaattagctgggcatggtggcacatgcctgtagtcccagctactcgggaggctgaagtgagacgatcccttgagcccaggagttcgaggctgcagtgagctatgatgctgccactgcactccagcctgggtgacagagtgaggccctgtctcatcatcatctttacagcaagaagttaaaggtagccttagattcttgccagatgtctacagctcagtgtttctcccgtgtagggaacactatgttcagtgctaagataaacacattttaactccccactaaaaccccacgaggaaaattttgtcactaacccttttacagatgagaaaactgaggctcagacagaggaaattacttggtcaagatcacagagcaagggaagctctgaactgagatctgaaccaggagtgtctaaaccattgtacatcatagactatacacaacaagccccttctctcaacaagtgtgmtaggttccttgaaccctggactgtgcatgacaaggtttatgggagccttcatcctgagcccagggaaagaagtggaactagccttgagggatattttgggctgactgctttatgtcctttactgcagttaaccattccttctatttcctcattcattcaagaaaaattcattgagcacctagtatgtactggggaatattccaggagcaggggaaacagcagcaaacaagacagactcaatctggaccttgggaacagataagaaatgaacaaatgaaaacattcagtttgtgtgacatggtacgtacagacttaggcagtcaatggcactttcaccttagatggtgtgagatggcccttctaaggaagtgacatttcagctgagacttaatgttcaagaagtagccagccatgggggtgggggacggtgagggaaaaggctgaagaaagagcattccaagcagggggaatagccagtccaaaggccctgaggctggaccatgcctgatgcattggagcaacagcgaggaggtctgggtggctggattaatgaagtaactattcaccagagatttatgacactagtgagaaatataagtgacaaaattataggtacactaaaactttacatctacatatgcattggagaaagaaaaatgctaataatgctaattactggggtgtttatatgatgggattatgggtagcctttttgtttgtttgaccatgttggttccatagttctatattggacctgagaagcctctgtccccactttaaagaagaggcaataaaagccacgagggattttaaggaaatagcccaaatgtctagcaaacagtggagtcagggtttgactctgggacacttgctgaatccagttttctgagttctgtcgttggacccaaggaagtctgcaacctccctactcctaaagctgcctgctaaattttgcaactcctcctaacttcaggcaagttagttaaggactctgtgcttctgttttcacataattctccctgattaaaaaaaccgttagacctagggctttacccaaaaaaatctgtcgaatgattaacaaccatctactcacctgggctacccaagaggctgaagtgggggccccaggtccttactcgatcttaccttgagagcatctgcttgagcaaagtatgtgagcgccccaatctttatgggtacccagatgtccatcatctgtgctgcaatatggctgagtgggaggtagctgaccaccatctcatgcttgtctgtcagttgaaagtcctttgccactgctcctgccatccacgtgatctgtaacataagggacaatccaaggtgccttatactgacttatgaaaaaacaacacacacacacacacgcactcagccagactgcagcacagacaatggacatctgggtacccataaagatcggggcactcacatactttaggcttaagcacatgctctcaaggtaagatcgaataaggacctagggcccccacttcatcctcttgggcagcccagatgagtagatggttgttaatcattcgacagattttttgggtgaagctccaaaaattttgggagaattatagttaccaacccccaggtgttatgatgattaaatgacttggtgtttgtaaagtatgaagacagtgtcttggtcatagtaggtgctttataagtgtttacttaattagtttatttatttagctaaatacatttaaaatcgccctccaggctgggcatggtcgctcacatctgtaaacctagcactttgggaggctgaggcgggaggtcgctggaggccaggagtttgaggccaagctggaaaacatagtgagaccccctctctacaaaaaaagttaaaaaaaaattagctgggtgtggtggtgtgtgcctatagtaccagttactcaggaggctgagatgggaagattccttgaacccaggagtttgaggctgcagtgagctgtgatcacaccactgcactccagtctgggtgagccctgtctgaaaaataaataaaaatttaaaaataaaatggcccttctatgagggtgaggcaccttggattgtcccttatgttacagatcacgtggattgcaggagcagtgacaaaggactttaaactgacagacaagcatgagacggtggttagctacctcccactcagccatattgcagcacagatgatggacatctgggtacccataaagattggggcgctcacatactttgctcaagcagatgctctcaaggtaagattgagtaaggacctggggctccgacttcatcctcttgggcagcccaggtgagtagatggttgttaatcattcgacagattttttgggtgaagccccatgtctaacggttttatctctgccctcatcttaatgctctatttagaagcattaaaaacaagaccaggcacagtggctcaatctgtaatcccggcactctgggaggccaagacgggcagattgcttgagctcaggagttgagaccagcctgagcaagatggcgaaaccctatctctacaaaaaccaataataatagtaaatttttctaaaaaacaaaaaacacctgaccaaataaaacaacttttttttttttttaaccagctggctacattctcctagtttttatctttatccaagtcagggcatccatgtatggttatgtagattgaacactgaacaacccaagacaaagatgtacttggtactgaaagtaaagagtgtgtgtgtgtgtgtgtgtgtgtgtgtgtgtgtgtgtttataagtcagtattcccaaatctaaaaagctccaaaaaacaggagtttttggcagcaaagtctgatctgaattgataagatgttgtttgtggtcttcattttattccacttactgggattatgcatatatttgtagaatttttataccaccttttcttgacttataccctttaagtattatcttttgcctttctattgtggtgaggatttagctcccttcctctcccgtcttctcatttctccttccccattctctcaacataaattattcttagttaactgagccaagtagtttatcatatgattccacttcctgcttggtacaactttttgtttttcccagaattaagttgcctttcttttccagtttggtgaagtttttgcatacatgtccagttgctccatctgatctgtcacatgcttatcaatagtctccaaatgttcaaatattcattgcattattattattattattattatttgagatagagtcttgctctgttgcccaggctggagttacagtgccatgatctcggcccactgcaacctctgtcttccgggttcaagcaattctcgtgccttagcctcccaagtagctggaactgcaggcctgtgccaccatgcctggctgatttttgtatttttagtagagatggggtttcacaattttggccagactggtctcaaactcctgacctcaggtgagccttggcctcccaaagtgctgggattacaggcatgagccactgcacccagctccattgcattatttttttcctccatccttttgcacttagctggactgttgttttaggttgtcttaggttgggtaccctagaagcaaaatctgagttggagatctttgtgatttatcaatggggagctctcaggtgaaaaccaaaaggaagtgaggagagaaggataggctgggggaaaaaacaagaaaggacacacattcagctggattgtaacttcagactgatcccataggaagctctgaggcatgaacgacaccagagttgttccactttgaggcaaggaggctgtgcttttgtaaccccaactcagatagtcattggctgtgggctcaggcatccatgtgggatagggagcataacttcccagttatttctaagtaagggcggttttctggaaaagagggaactgtgggccactagagatctgataggacatcaacagcatcttctacaagctgccatacagggatatccctttttcccactcctgggttggatcccctattttctggggtctttgccttcttttttggattattccttgatttagctggatatcattcattggtaggttttgcaaagtagttatgtgaaagaacactttgatttcttttctaaatttttttttttttttttttttttagagacaaggtcgtgctctgttacccagcctggaatgcagtggcatgatcatagcttactgcagccttaaattcctgggctcaaaggatcctcccacctcagcctcccctgtagccagaactacaggcatgtgccaccatgcctgactaatttgttttacagtgattttctacatgtctagactttgcaaacggagccagaaaagaactctgacattttccccaagttacattctctgaattagtttcctgttaatgccacaacaaatgaacagaaacttagtgacttaaaacaatatttatttatttatttagaaatggagtctcgttctgtcacccaggmtggagtgcagtggcagtggcatgatctcaactcactgcaacctccacctccgggttaaacgattctcatgtctcagtctcccaagccgggattacaggcgtgcaccaccacgcccagctaatttttgtatttttagtagagacgggatttcaccatgttggcaaggctggtcctgaactcttgaactcaagtgatctgcttgcctcagcctcccaaaatgstgggattacaggcataagcaagcgcgcctggtccatttattatcttatagttctggtggtcagaagtttgaaaatggtctcactgggctaaaatcaatatgtcatcagggctgcattccttctagaggctcttggggaccttttccagcttctagaggccacctatgttccttatctcagggccccttcctccatcttcacagccagcagtgcagcctcttcccctctcctgcttccctcttataaggaccctgtgatgacattgggccacccagatcatccaggatgatctcccatctcaagattcttaacttaatcccatctacaaagtcccttttgccatgaaagattacatattcacaggtcccaggagttagaacgtggacatctttagggggccattattttgcctcccacactctccatcaagcaggctaaatcttagggcctttgcacgtgcttctagaaggttctttctcttgttctttgcagggctgactcttctttgtcacttagctctctgctaaatatttccttggcccctctcaatccctctcatatgccccatgctcagtgcctgagatgtgttaggtcttcaatacatatttcctttcttggctgaatacataatacatacacatttacctacaggacctgagaagttcccattttcccacatccttaccaactcctaatattgtcaaaatgtttacaacttgtcaatctgaatagtgacaaaagtgtcttaatattttcagaaatttccagattgttttctgaagtacgtgcaccagaaatgtgcgaaggttacagtttctctacatcttcactaacgcatgttactatctgttttattattattattgccattctaatttgcatttccttggtgattaatgatagtgagcatctcttcatgtgtttattgaccatttacatatcttctttggaaaaagaaatctgttcaaatagtttgcccatataaaaatgtggttgctctttctgtgctagcatgactagtaaaaagaaaagtaaaagccaggcacggcggctcacgcctgtaatcccagtactttgggaggccaaggcaggcagattgcttaaggtcaagagtttaagaccagcctggccaacatggtgaaactccgtctcctccgtctctactaaaaaaaaaaaaaaaaaagaaaaagaaaaattagccaggcgtggtggtgtgcacctgtaagcccagctactcaggaggctgagacaggagaatagctcaaacctgggaggcaaaggctgcagtgagccgagatggtaccactggactccaaccggggcaacagagggagactgtgtcaaaaaaaaaaaaaaaaaaaggaaaggaaaggaaggcaagggaagagaagggaggggaagggaggggaggggaggggagaaagaaggaaagaaaggaaggagggaggaaaaaagaggaaggaaggaaggaagaaagaaaaagaaagaaaggagaaaggaaaaaaattaaaaatgaaaaaaattggttgcatatctaatctcattgttgagtgttaagggttctttatatattctggttacaaatcctttaccaaatttgtggtttgcaaatactttctcccagttctatggcttgttgtttcctcaataatcttttgaagaggaaaaagtgtttaagttggatgaagtttgatttatctattttcttttatgcttttggtatcatatctaggaaatctttgcctactctaaagtcacagggattttcttctacgttttcttccaaaaggtttttagtttgagctcttacatttagggctataatgcattttgaggtaattttcatgtttggtgagaaataaggctctaaccctaaattttgtggaagcgtttgtttgttttattttgttttgcatttgaatagtccccacccgccccccccccaacgaaatttccttggcattttgttgaaaatcaactgagcataaatttaaggttttatttctggatcttctattttgttccactgatctgcatctctgtctttacgccaaagcctcactgacttattacactagcttgatagcaggatggctaacgtttcctggtttgcctgggacttccccagttttaaaacagaaagtttcacatttcagatattcctgcagttctgggtaaaccaggacggttgttcaccctactttagaataaattttaaaatcaggtagtaagtcctccaattttgtctttcttttccaaaattgcttgggctattctaggtcctctgcatttctatataaattttaaagtcagcttgtcaatttgtatttaaaaaaaaaaaaacttgcctagatttcgataggggttgcattgaacctataggtctctttgggggagaatcttgcatccttttttaacagttgtgtaatattccactgcatgcttggaccacagtttctttagccaaccctttgtcattgaacctgtaagctgtttccattctgttacaaaacagtgttgcaaagaacgtcttgaacgtgtttctttgtgtgcctgagtctttccttcagctgaattccttcacccacagaagtgaagttgacaggttgcacttaaaatgttaatagaactgtcatgttaccttccaaaaatattttaccagtttatgcctctcatcaaatccctagacagagtgcaaaaatctgactggccaacccagctaatgggttgtctccttttggttgggagtcctgcgtaatctgatcagtgaaggaatgttctcttgggcaaagttgggtggatcaggagagatggacatccctggtgcacggaaggccctgctgtggctaacctagcttcgttccatacagggcaccttggtaagtactctaaaggaggtaaaacctactgtcttcattggagtgcctcaaatttgggagaagatacatgagatggtgaagaaaaatagtgccaagtccatgggcttgaagaagaaggcattcgtgtgggcaagaaacattggcttcaaggtcaactcaaaaaagatgttggggtaggtggagcatccagagggctgggagggtagttggtgaggaggctcagccttctccagtgggtcccatcagcccttctccacytgacggcattcttattcacaggaaatataatactcccgtgagctaccgcatggctaagactctcgtgttcagcaaagtcaagacatcccttggcttggatcactgtcactcttttatcagtgggactgcgcccctcaaccaagagactgccgagttctttctaagcttggacatacctataggcgagttgtatgggttgagtgaragctcgggaccccacacgatatccaaccagaataactacaggcttctaaggtaccagcccccggggcagacccctgctcctcccataacatggggtcaagagggggaaggtgggtggatagatgggcctctgggttaagaggaatcctgacgtggtgtctccagaatgatcctgttctccagcctccaagtcctaactccgcatgaccgtgggaaaccctggatggtaagagagcccacagataagggggatggctctctgaacattccatggtctccccgtttgtcacttgtgagttctgccttcaaggtcaccgcctgtgacctcagcacctttcatccccatgatcctccatctcaaaacacctccatggccgattcctggctttctcccaagctcagcttgccctaggctgcaaggttgaacccaatgataagaaaactttaagaataccaaattgaggttcaactccccatctgagagctgtcagtcatagaatcttctggttgtgtctctccctgactccctccttttagcatgggtgaggtttgaaaaaatcttttcatacatgtgtttatttattaaattttaattagagatagggtctcactttgttgcccaggctggagtgcaatggtacaatcatagatcactgtaaccttgaacttctggattcaagcattcctcctgcctcagcctcccaactagctaggactacacgcatgagcctccatgcttggcaattctgtaaaagtttttttgtagagatggggtcttgccatgttgcctaggctggccttgaattcctggactcaagcaatcctcagcctcccaaagcgctgggattacaggcatgaaccaccatgcccagcattgccatacatttaaaagtcatttgtacttcctttcctatgagctgtctgtccatattatctgcctgttttaaaaattagattattggtccctttattattggtttgttggcactctttacatattaggaaaatcagccctttgtctttcatatgagttacaaatattttatcccctggcttgtcattggtattttgattttagttaagatgttttttactgtgcagaaatttgtggtcacaaatttagatggttgaacttatcgatctcttatggcttctggatttttctatatacctaaaaaggcttcagtgggggaaatcataaggcagctctttgtaagttttaaatttctcaggtctgtcttcattttttcttttgctaaccaggggaatacctacatttaaccctgggaccattggccttgctaactgttaatcaaagagatctcagcaacacacggagaaaatatttcctttcctgcatcctagaactgcactggccagtgctatctctaggaaaaaaaaaaaaaaagacaaagaacccagatttcaaatagtgctactctgttttatgaaagtaacttttacctctaaagagattgtagttggttgccgtacttaaaattagctgtcctaatcactgcagagaggtctacctgttttctttaaaatgagggttttgttcctatctttaagccaaaggcatttttttctttgccggcatatgtggagatgaaaaaaaaaaaaaaaaaaaaaaaaaaaaaaaaaaaaaaacgaaaaacagcctgcaatgctgctggattttctttcattttttgtttttgtttttgtttttgttttttgagacagagtcttgctctgtcgcccaggctggagtacagtggcgtgatcactactcactgcagccttgacctcctgggctcaggtgattctcccacctcagcctcccaagtagctgggaccacaggtatgtaccaccatgcccaacttttattttttattatttttgtagagacggggtctccgtatgttgcccaggttggtcttggaactcctgggctcgagcaatattccctcctcggctttccaaagtgttaagattacaggtgtgagccaccacacctggccactgctaggtttcccagttcacaaagcctttgggaatctgacacgctggattaaacactgcagcaaacacctccttctgtgcgctggggtgcatatccagcctgctctagctgagcagagtattaggcacctaggctgaagatccaggcagagctgggtggctgactttgtccctatgagcctgtttctctgcttctgtcccctggcagctgtggcaagatcttgactgggtgtaagaatatgctgttccagcagaacaaggatggcattggggagatctgcctctggggtaggcacatcttcatgggctatctggaaagtgagactgaaactacagaggccatcgatgatgaaggctggctacactctggggatctgggccagctggacggtctgggtttcctctatgtcaccggccacatcaaaggtaccaggggctgagctctttgggaatctcctgcaagcaggcccaccctgaacatttaagggcccagggtaccagcacgaaggccacccccagttcctcaccttccaagaggagctgtgcagaaactcctcagtctgtacaacccagctctatcctcctgtccagcaaacagttaccccttggtcacttggtatcccgtggtccaccctcaggaggatggacctgcaaaagacaagccttggaacctcctgaagcccctttcagaatagcaccagcccagaggaaaactcagtaagagaaggataaagaaattccttgtgacatcattttggcacctggatccagccatatctgaaagccaaagaccttttgaacttttcagttatattgagccaacagttttacttttttttttttttaactcaaactcattcaagctggttcaaatgggcttgagtaaaaaagtgccatcttctcctgcattttaagaggataataatcgacagagttgtaaggattgaagaaagtatagaacaaggataagccaacttttcctgaagagggccctttagtaaatatttttgggttcacaaaacatgtgtctctgttgtagcttctcaactctgtgatttgtagcacaaaaacagctgttgacaacacataaagaatgggtgtggccagctgccaatatgaatatcataatttttatgtgtcaaaaaaaattcttcttttgacttccaacaacttaaaaatgtaaaattcatttttagcttttggttatacaaaattgaatagtggcctggatttggccactatgggccatagtttgccaaaatctgatggagaacacttagtgcttttttactcaaacccatttaagatgggtttaaataggtttgaggaaaaaaataaaaagcaaaactgttgactcaacgtaactgaaaaggtcagttggccaaaaggtcagctggcttcaggcatggctggatctgggtgccaaaatgaggtcataaggaattttaaaattcttttcttgagttttcctctgtgctggtactattttatttttcagagaaggtctcgctctgttggccaggctggaatgcagtggtccaattatgactcactgtggcctcaacttcccaggctcaggtgattctcccacctcagcctcctgagtaactaggactacaggcgtgtgccaccacacccggctatttttttgcagagacccaatttcactgtgttgcccaggttggtctagcacttgtgggctcaagtgatctgcccacctcagcctcccaaagtggcaggattacaggtgtgagccactgtgcctggccactaggtttttttttttttttttttgagatggtgtttcactcttgttgcccaggttggagtgcggtggcatgatctcagctcactgcaacctccgcctcccaggttcaagtgattctcctgcctcaacctcccgagtagctgggattacaggtgcacaccaccaaacctggctaatttttgtatatttagtagagacggggtttcaccatgttggccaggctggtctcaaactgggggttccacgttgtcatggctggacatgtaccaagccaagctctgttccagaaatccttatcactgctggtggtgaaaatgtgccccccattcctgttgagaccttggttaagaagaagatccccatcatcagtaacgccatgttagtaggagataaactgaagtttctgagcatgttgctgacgctgaaggtaacatgggtttgctgtcattgggggaagtctctgcagccrgtcttgggttccctggccccaccccagggtcaagaggatgcayctgtgggttcaagacccacttcttggtctgtgggcctggggaggggtgctggtcaaggagcatgggtggtgacagaggtgtctgggggcagtgtgagatgaatcagatgagcggagaacctctggacaagctgaacttygaggccatcaacttctgtcrgggtctgggcagccaggcatccaccgtgactgagattgtgaagcagcaagaccscctggtctacaaggccatccagcaaggcatcaatgctgtgaaccaggaagccatgaacaatgcacagargattsaaaagtgggtcatcttggagaaggacttttccatctatggtggagagctaggtgagtggccatgacatttggaggctggtcccttgttagcatctgggactgtgtgggctctgaagagacaggtccttttctgaaggtcagagggtctatgaraccagccagggaccaggagagggaggctgccaccttcagctaactggtccccagctcctcatcttggaaataaaatccaacctccttactatagctctatacaatctctcgcctgctgacctttcattcactctgcaccaactctatgggctttcttgatgttcctgcagctctctgggctttgtccaactatagggcctttgcacctgccagtctgcctccctgggaatacccttccccctcaattccttgcctggatggcttcttctcattgtccaggtctcaccctacaggcctcttccccctcagagcagccttgttacaggacccccaggtttgtatgcccactgcacagtaatataccaatacactgagacagcaggggatgcagcaaagacagagtttaattatggccaggcacagtggctcacgcctgtaatcccaacactttgggaggctgagttgggcagactgcttgagcccaggagtttgagaccaacctgggcaacatggtgaaatcctaactctacacaaaatacaaaaattagctgggtatggtagcggtgcccagctactcaggagactgagaggatcgcttgagcccagggaggtcaaggctgcagtgagccacaatcatgccagtgcactccagcctaggcaatgcagtgagaccctgtctcaaaaacaaaaaacaaacaaacaaaaataaaaaaggaaattaaattcccttgcagggaagccaaccgagatggaaggaaccctcaaatctctctttgaggaattctgggctggggttttaaggggatctttgggggtgaagggctggaaaattagagtcattgattggttgrggtaaaggggatgaaatcatcggatgtggaagctgcattctttggtaagtcagctcccgtggggtccttcagatcagtgggcatcagtagtttcactggtatgcaggacttgaaaggatatctcagatggaaaacttgacctttcacaatgcttaatatgttatctgtagagcagttaaggggaactatatcttgtgattgggttttttgtgtgtgtgtgattctggggcaataggcaaacagctagctatgaggaaggggttagagagcaaactgacctaatgatgaatgttgagtgtgctgtaagtgtggctgattttagtttgtccccctcccttcttctctgattaatattataaagttttcagggatggtttcagccctccctgaccatgctggctaaagtggcttgccatcgtccttaatatttcacccagtagcttgctgccacccccattataccaccctgtcttctttaaagcatcagaacatgaaattagtctctgtatgttttatttttgcctctcttcccccatgagggaagggctcactccagagtggggatactggattctactaatgtactttcatttgcgagtttgctgtcagcgctcggctgtaatctgacggtgtggatggaagaatcagagcaagtatgtggcaatgaacaacctgggttcaaatcctgtcccctctacacagggaagtgacttgtcccactgagtcttgttttttttttgtttgttttgagacagagtcttgctctgttacccaggttggagtacgatggcacaatcacagcttgctgctgcagccttgaactcccaggctcaagcgatcctcccacctcagcctcctgagtagctgggatgagtgcgcgccaccatgcgtggctattttctttctttctttctttcttttttttttttgagacggagttttactctgtcgccaggctggagtgcagtggcgcaatctcggctcactgcaacctccacttcccaggttcaagcgattttcctgcctcagcctcccgagtagctgggactacaggtgcgtgccaccacgtccagctaattttttgtatttttagtagagacagggtttcaccattttggccaggatggtcttgatctcttgacctcgtgatcaacccgccttggcctcccaaagtgctgggattacaggcgtgagccaccgtgcctggccgctatcctctttttgttttgtagagatggtgttttgccatgttgtccaggctggtggtcttctcatctataagttgaaaacacagtccttgtggggttgcttgagacacccagaggggcttcaatgcccctggtgactcagaggctttcaatgaaagtcctgggctcagggagcagacaactcccagtttgagacttgattctgccgtgcacttgctggctgacctcagaggaactggtcctctctatgccccagtttcctcacctgtaaaatggggataggggtatggtttgagatgatgatatccctcctccattgggtgcacagtccacatcaggcacagaatgcaccatgctcttcaccttccagctcacagaatcctcaccacagctgaaggatcacatggaagttttatcatccccatacagatggcaaaagttacacaccctgaaagtcaatggcacagccagccacccagcctagccccaggcatgggactctgttgcctggtcatgcatgggtgtgtgtaattttcttttatctccacaactcaattgwtttctcctttctcgataggtccratgatgaaacttaagagmcattttgtagcccagaaatacaaaaaacaaattgatcacatgtaccactgactgctttgatggagctgctctcagctgttctgatggtgagattcagttgcttggctttgctgggctatgcattcagagtccaagagagggctccactgtgtggcaggcagatctgtgactggaactgcagaaaacacacacayacacwcatacayacacacacacacacacacacacacacacacacacacacactcttagttgcagtggattctgagtagcaggcttcaactcatgctgtctctactctaccagggtcatggtagggtgtgtaaactccttcagctggccaccaatgttgttagctgtgcttcctgccttttctatttgtttctagaaagtaggaggcaatgaatcccaaatgtctcattgggtcttatttggagaaggcctttgtcagaaactttagtggagaaagttctacttgccaggaactcaaggaatgaggtgtgttggcccattacacagataataagggatggaggcttgaacttccactatccaccgtttatcctctcttttccccaagacatgtgcagagggagcctccatgacaccatgaatcactgatagttattgaggtgttttttttttttttcttcactagatgcacagtgcaggcagaaagtagaatgcatcttcaattgtcctataggctgcctgtaaccttttcatgggcaacttgttctaatgccaccagccaacccatgttttagtttgctggggctacattacaaagtaccacagactggagggcttaaacaacataaacttattgtctcacagatctggaggctaaaagtgtgagattgagaggctggctggcttggttccttctgagggctgtgaggggaggatccattccagacttctctccttggcttgctgatggctgtcttctctctctgtcttcacatcatcttccctctgggtgtcactgtgttcaaatttcccttttatagggacaggttagtaagattagggcccacccttatgacctcgttttaacttctataatgatctagtttccaaataagttacaccctgaagtactaaaggttaggacttcaacatgtgaattgtggagggatacaactcagcttgtaactcatcatatccattgtcctttgttcaacgttaactggtttaacccttccacaccttcatttgttgatgtcttgtgggtgggcccagcagttcaacgtaccacattcataattcttcatctttcacaagatttccaatttcactttccagttgaatgagaaaccattggacattgatgtgggagtgagagatggaccctcttacaccagtgctgtccaatatggcagccactggccactatgtggtctgtccaaaccaagatgtgctgtaatacataaaacacactgggcttcaaaagcacagcmccaaaaaaaaaaaaaaaaaaaaaaaaatagaatatacaatatctcatcagtattttaaaattttgattacatgttgagatgatattttggaataccgggttacgtaaaatatttattattaaaagtaattttaccagttttaaatttttatttactttttagagacagggtcttgctctgttgctcaggctagagtgcagtggtgcattcatacctaatgttttaaatgtttttgtagagatgaggtatttctatgttgcccaggttggtctcaaactcctggcctcaagcgatcctcctgcttcagcttcacaaagtgctgtgattacaagtgtgagccactgtgcctggccaagttccttttttaaaaatgtagctgctatacattgttaaattgcataggtggctccagtaatgtttcttgtggatagtgccactctaaagttcattgtggggagattttgggtgacagccaatttataaatggatcgattcactcgggaatattttcatcatatggtgactgtgggatcttggagactgaatgcacatattacgagaatccccatgtgataacttgtgtttctcctctttgcagccttcagcaggaagacctcattgcaataagtgaaatgctgctctaggtagaagctctccctgctgtttttaagaagccacattcctcattggtcagtttcttgattgttcgtctgttggagaggtgctccctagaagaayctgccatacgtttcaaagcaataaaatcactgtatatctttctaaggaccttcaagtcatgactccagggaagcctattgggaagtctactaaaaactgcctgatttacaagaaagacctgaacttgtgggctcccatttgatttttttctcctcaggggactcagacattagaaagaaaaagcctcacagatttgaagaactggacccccaaatcaactcacctgcctggaagcaactgggaaacccttccaataagtcctgataataaagcacttcagggtcccatgtcttgatttttggcttgatagaaatactttgtcctttatttagtgtgatggggagggcttggactctgaaatcagttctgggttcaaattgtgaccagctgtgatttcaactgtctgaggctcggagattttaaacctggaaagtagatccccatctcggagggtggccatggaagttcatggagatgatgtacagggaatgcagtatctaactccagaaagtcctcggtttgagttaatggttatcatcaacacagtcactcttggttaactcaagagtcaaggtatgactcttgactaattccgtcattagggaggagttttctgttgtagtaagttaagtaaacttaaagaagatagtttattcctctcccatccaacagtcatattataagcagaccagagctgataaagcatattcatagtgtgtctccgaaatattagtagggagagtgggagagggaacatctcccagcctggacagaaacagcatatcaggagcaacaaaactcccagtgtctcttaagcttctagatactcagaggcaggccagagacccttttgagttccattttttaaatacaccagaaatttaaaatgacattctccttgcaaaaaaaaaaaattaatgcaatgccgataaggctaatgtcatatttgattgctgtactaggccattattgcactgttataaagaaatacctgagatggggtcatttataaagaaaagaggtttaattaattagctcatggttctacaggctttatagaaagtatggtgctggtgcctgttcagcttctggtgaagcctcagggagctcacaatcatagcggagggcaaaaggggagcaggcatgtcgcatggcgaaagcagttgcaagccagagggagtgccacacatttttaaatgaccagatcttttgagaacacactatcgtgaagacagccccaagccatgagggatccgccccyctgccatgacccaaacacctccaccaggccccacctccagcacaggggattacagtgcaacatgagatttgggcagggacaaatatccaaaccacatcaatggccctcctcaactatttggcgggcttttactttttaatgagttagtacagttggtcctcactatctgccaattccatatttgcaaatttgcctcatcgctagaatttgcttgtaaaccccaaatcaatagttatggcactttagaggtcattccaggacatacacaggagtgaaaaatttgagtggccaactgtacattcccagctgaggttgaacaaggcaacactctggcttcctgtttcagctctcacactgtaaacagtgccctttctgaggtatatctcatgccacattttctgcattttcatgtttctgttagtaaacctttttgagttttttaaaaatagagacagggcctcactctgtcacccaggctggagtgcactggtgtgatctcagctcactgtaacttcaaattcctgggctcaagggatcctctcctgtcttggcctcccaaagcactggggttacaggtatgagccactgaactcagccaaacccttctaattttatccatgactacactgtacaatttttggtcaatataattctattttatagtttttgtttctactgtccatgtgatctccccacttgtaggttttctaggtagttaatgttggtatatggaagtgctgttgatttttgtatgttaatattatatctagacacctcactgctaacctatttctcaaaatgtgtaagctttttacagagatgtgcatatcttttgcaaatatttttttacttccttttcaatattgattcctcatcaaggaaatacaaatggttgatcatgtcaagtgagggaagctcgaatacaggagaggaatgtatgtattttctataatgattctcaccctggtctcactgttctcttaatgttctctcaatgttttttgagaaacgacaagaatctactaatgtcaggaaggcttttaaaatttaactgtggtaaaatatatgtaacataaaatgtgtcattttaacccttttttagtacacagttcggtggcattaagcacattcacattgttgtacaaccatcaacacgacgcatttctagaagtttcatctcttcaaactgaaactttatatccatcaaacaattccccatttccccttcccctgaaagctatcattctattttctgtctcttgaattttactactttaagcaccttaaaagtgaaattgtcggccgggcatggtggctcatgcctgtaatcccagcactctgagaagccgaggcgggtggatcatgaggtcaggagttcgagaccagcccagccaatacggcgaaaccccgtctctacaaaaaatacaaaaattagctgggcgtggtggtgcatgcctgtagtcccagctgctcaggaggctgaggcagaacaatcacttgaacctgggaggtggaggttgcagtgagctgagatcatgccactgcactccagcctcgggaacagagcaagactccatctcaaaaaaaaaaaaaaaaaagtgataatgtaagaatatttgccattttctgactggcttatttaactgaggataatgtcttcaagggtcatccttttttaaagttttttcaatttttttaacaattttttaaaaatagagacagggtctccctatgttgcccaggctggtcttgaactcctggcctcaactgatcctcccatctcagcccctcaaagtgttgggatcacaggtgtgagccaccacacctggcctcatccatgtttagcatgtgttaaaatttcttttttcaggctgaatatttcatcatgtatgtacacatgtgtgtgtgtgtatgtacacatatatacgtggataaatttatccattcatccatcaatagacacttgggttgcttccaccttttggctcttgtgaatcatgcttctatgtatatgggtccatggcatggttcagggtccatggcaaaaacgcactcaacgcccagaaaagaaaccatgggtgtataaatatctcttcacgcccctgctttcaattatgcttggtgggcaaatgaattcataaacccccaggcacagtgactcaaagtccttctctaactcaaccttctgggagcccagggctctgcttccttgacctcgatgatgcccacaccttatttacctcctccatctcaccactcttcttccagctcccttgggaactctctcactcaacctcaacaatgtagaacagtgactctggaatccctcctgctgccagacttgcccctggctcctccctggggactgtcaccttgcagaccactggcttgtcagggcagtgaagggccttcttgggtagaccctccctgcccgctaaaactggcctctacaaagaggcaatgggccatgtccccatcatggctctgggccacgggatacacagtgatggcaccaggctggccatggacaggaacattctggatgtctggtctagggaccactgtccccctgtggctagaacggggggagtgatcaagctgataaaaaggtagagtccagaggccgggcatggtggctcatgcctttaatcccagcactttaggaggctgaggtgggtggatcacgaggtcaggaggttgagaccatcctggctaacacggtgaaaccctgtctctactaaaaatacaaaaaattagccgggcatggtggcgggcgcttgtagtcccagctacttgggaggctgaggcaggagaatggtgtgaacccgggaggcggagcttgcagtgagccaagattgcgccactgcactccagcctgggcgacagagctagactctgtctcaaaaaaaaaaaaggtagagtccagaggccgggcatggtggctcatgcctgtaatcccagcactttgggaggctgaggcgggtggatcacgaggtcaggaggttgacaccatcctggctaacacagtgaaaccccatctctactaaaaatacaaaaaattagccgggcatggtggcgggcgcctgtagtcccagctactcgggaggctgaggcaggagaatggagtgaacccgggaggcggagcttgcagtgagccgagatcacgccactgtactccagcctaggcgacagagcgagactctgtctcaaaaaaaaaaaaaaaaaaaaaaaaaaaaagaaggtagagcccagagtgggcactgccttcccaatgacaggggcatgaaaatatgttgtggatgggagggagggactgggagcccacatacctcagctcctcctggggatgaactaggctgcacaccaggtggggaatgtgtgtggtaggttcatttccttctatgctcctccttctcttcactccagcccccaacccccccctttttttttttttttttttttttttttttttggagacagagtctccctctgttccccaggctggagtacagaggtgcgatctctgttcactgcaacctccacctcccaggctgaaatgattctcctgcctcagcctcccgagtagctgggattacaggtgcccgacacgatgcctggctaatttttgtatttttagtagagatggggtttcaccacgttggccaggcctcaagtgatccgcccaccttggcctcccaaagtgctgagattacaggcatgagccaccgcacccagcctgttatctctctttttttttttttttttttgagatggagtctcactatgtcacccaggctggagtacagtgccgcgatctcggctcactgcaacctccgcctcctgggttcaagcaattctcctgcttcagcctccagagtagctgggactccaagygcgcgccaccacgcccggctaatttttgcattttttagtagagacggtttcaccatattggacaagctggtctcaaactcctgacctcgtgatccgcccacctcggcctcccaaagtgctgggattacaggcatgaccccacgtctggctgcctgttacctcttttaagatgcttctccctccctcctttgcctggtcagtgtctacccattgttcagagaagccttccctggccacccccataactcggtgggaatcctgtgcctccctgctggaccctcccacccctgctgcccactgtaatttcgtttgaagatctgtctgcccaagcccagcaaactagatgcccccagacagtgacaaggaaaacaaagatactttgaagaccatgtcctcggacagattcagagtccacgacagaaaggcactcaacacccaggaaagaaaaacagagtttggggctccttggctcctgggtgagggtagtggtgttcccagagaagccagtttgagagtggggatctagcgcttcagggctggccaaggccgttcagccagtgttgggatcctttagggttcaatctatctcttcagaagttgcctgatgggatgcgggcatggagagcaccaccatagggtgcccggctgggtgtatgggggtttgggggtgcaggtggttagcagttgtcagaagtgtctggtcccgccgggcgtggtggctcatgcctgtaatcccagcactttgggaggccgaggtgggtggatcacctgaggtcaggagttcgagaccagcctgaccaacatgttgaaaccccgtctctactaaaaatacaaaattagctgggtgtgggggcgcatgcctgtaatcccaggtacttgggaggctgaggcagaagaatcgcttaaacccaggaggcagagttcgcagtgagctgagatcatgccattgcactccagcctgagaaacaagagtgaaactccatctcaaaaaagaaaaaaaaaaaaaaaaagaagtgtctggtccctggggaggagacggcgcccggcagggacagtgggcctacagctgacctgtctgcttgctggtgggtttcctgctgaactcctctctgggtcagtgcgtctcactgtc

SEQ ID NO: 95109 - DNA, 93172 bp, Homo sapiens
  misc_feature (1)...(93172): n = A,T,C or G
ttttttcccttcatttatactattttgaaaagtaccaaagaagagactgatgtcagcaagatggtggaataagatttttcagcactcatccttttgcagaaacatcaatttaaacaaatatctatgcaaaaaaaaatgccttcacaagagctaagaataccagctgagagattatagcacctgggtacagcatagaaatgagaaaagatgcattgaagagggtaggaagaatagttttacattatctgtgttaccacttccccaaccctaggcagcacagtggagagagatatccttcacttggatatctctccaagatctccaaggagatatccagggacagggaattgagcactaaactttgccttggacccaacactgggtccactagagtaaaacccagagccaggcaggtgtccgtgggcccagactccaatccacttggggattaaacctccaagcccactctggtgccaagtgtgaccccacagcttcaggttccaccctagcaccctaagccagcccctgcacattcaggttcaaaacttatcccagcaccaggtcaatgcctacagacccagacatcaagcatcagtggaaataggctccaggcttgccctcaccaactcaggctccaggcctactgcccttggattcaatcaataggtctaccccagtggatcctgaccccaggcccactcacctgctgacctaggcatcaggccagtcttcctgaaggctccagcagaaagcccactctcagattataccagacaacctgccccaaatctctggacgggctgactggtgaaaaactttcccagacaaagccagtttgcaaatactggaataagtcactacttctttaaatgctcagatatcaacagaaggcagaaagaaacatgaaaaagcaagttgatagaacaccaccaaaagaataatctcccagtagctgaccccaaggaaatagagatataaaaactgcttgacaaggatttcaaaataattgttttaaggaagttcagccaacttcaagaaaatataaagaaattcaaagaaatcaggaaacacaatgcacaaccaaaatgggaaatttaacagtgatattgaaattatttaaaaagacagaaattatagagctgaaaaatacaatgaatgaaataaaaatgcaatagatagcatcaaaagcaatactgattaagcagaagaaagaatctgtgaactagaagacaggttatttgaaaacatacagccaaaggagaaaaaaaatgataaaaaggaattttaaaaaagcttatgggtcttatgggacaacctcaaaagtacaaattttgagtcataaaagctcaagatggagaagagagagacaatggaggtataaagcttatttaaagaaataatagcagaaaactttacaaatatggggaaagatataaatacacaggtaaagagggtcaaatgtctccaataaggttcaattaaacaaaactataccaagacacattataatccaaccattaaaaaccaaagagaggatcctgaaagtagcaagaaaaaagaagcaaataacatatcagagagttccaatgaaattagcaatagatttatcagcagagacttacaggccagggatagtgggatgatatattcaggatgctgaagaaaaaactctgccaaccaaaattattgtacctcaaaagctgaaatgaaggagaaatgaaggagcgatgaagaaggagagataaagactttcccagacaaaaactggaaagaatgtttacatcgctaagcttgtcttacaagaaatgctaaaggaagttcttcaagctgaaagaaaagaacactaattagtaatacaaaaacatatgaaagtgtaaaactcagtggtaaaagtaaatacacagtcaaattcagaacactctaattctgtaatggtggtgtgtaaattgcttatatatttagtatgaaggttaagagaaaaaactattaaaaataatgactacaataatttgttaagagatacacaatataaaaagatgtaaattgcagcttcaaaaacaaaatgtgagggagaatggagcaaaagtttagggttttttatgcaatgaaagttaggttgttatcagctttaaatagcctgttataactgtaagaggttttatgtaagcttcgtggtaaccataagggaaaaacctacagtagatacacataagataaaaagtaagcaatcacagcataacactagagaaaatcacttaatcacaaagtaagaaaacaaaataggccaaaagcaacaaaagatctataaaacaaccagaaaacaataaaatggcagtagtaagtccttacctattaataattaccttaaaagtaaatagattaaattttttaatcaaaggacatagagtggctgaatggaaaaataaataaataaaacaagacccaactataagctgcatacaagagactcatctcacatttaggacacacatagactgcaagcgaagggatgggaaaaaatatccatgaaaatgaaaaccaaaaaagagcaggttggctatacatatatcagataaaataaactttaagtcaaaaactgtacaatgaggcaaaaaattattatatagtgaaaaggggctcaatttctcaagagaatatgacaattgtaaatatatatgcacccaacattgagacacctaaatataggtctaatcccagcactttgggaggccaaggtgggcagatcacctgaggtcaggagttcatgaccaacctggccaacatggtgaaaccccgtctctactaaaaatacaaaaattacctggggctaaatgggagtgcttcaatggtgggtctgtgagcaaagattgtgaacttgttcaagacaaatgagaaaaagagagtacttcttcctaggaaaaatttcatcagcctctccatgcctttgttataaacagacagaggccccatttaactggtctagagaattttggaaccaaacatgagggtggcacatgcctgtaatcccagctactcggggggctgaggcaggagaattacttgaaccagggagttggaggttgcagtgagctgagatcacgccactacattctagcctgggcgatagagctaggcttgtcaaataatacagaatttcagtcagatagaaggaataaattcaagagatctgttgtgcaacatggtcactgtaacttaataacgatgtatattttgaaaatctctacgacaatttaagtgtattcaccagaagaaatgataaatatgtgaggtaacatgtatgttattcagctcaatggagctatttaacaatgtatacatatttaaaaacatcatattatacatgataaatgtgtatgattttaatgttaattaaagaaataaagtcacagagaaagaaaatggtggcaaatactttgctaaataataagtaatcatactaattcaagtttttgtcaaatgtcagtatttggggtttcaactagttattacagagctgaaaattctgcatgacaacacaaacccttattgaaaatttatttcacttttatctttcaatgctccatagtaatagagaggaatttcacctctagttaagagaggggttgaagatttgctgagtggggagaagcacaccaacattagtttctcctgtggacaacagatttaatctatgttttatttcattcagctaagagttggtccttaccaagcaattatggccacctccgttttgtaaatgagaatactgatgccaagagagagatttttgccaaaggcggcacacagaagtggtggagctaacattcaagccagcctatggaactccaaagcctgagctctttcctcagcccgtccctttagcttttcctggagcattggctggggaatgcctaggaggaaggggagggcttgttaaattgggtagattagtgcatggaggaaaagcctctcaatcaaagaggtgtgagggtttggaagaattgactaattacaaaacatgccctaggctcagtctctctctctccccagctccttccttctttctttcagggcagaatttctccagcttggctctattgacattcattgttgttcattttattggggtgggactgtcttgtggtttgtaggatgtttagtggcattactggcctccatccattaaatgccagtagcatccctccccagttgtgacaataaaatatatccccagacattgccaagtggcttctggggtagggaatctctcagatttaacaaccggttttggtttcggttttgtttttgagatggagtctcactctgtcgcccaggctggagtgcagtggcatgatttcagctcactgcaacctccgcctcctaggttcaagtgattctcctgcctcagtctccagagtagctgggattacaggtggcccactgctcccagataatttctgtatttttagtagagatgaggttttaccatgttggccaggctggtcatgaattcctgacctcaggtgatccacccaccttggcctccgaaagtgctgggattataggtgtgagcctccatgcccagccaacaaccagttttatagtgaccaaccatcccagtttgccctggactgaaggatttactaggatctctgaggcatttgtcagggattcaaggctaaaactaggatagtccagggcaaactgggatatttggtcaaccaacaagtaaagtttcatctcctggttaaattaaggctgtggtgagagggggcattgtgttgattgtgtggttgtcctgtcagtcttcagtttctctaagctgttgctatatcaagtacatctgcctaatactcctttcttccccctcaggtagcctgctagggttgtaggggaggtgtcttacttaaggaaggctggctgagccactgtatgggtcattacaggacagaagaagaccagagtgaatgctggtctctgtgtgttttttttttttttttttttttttttgcgtgtgtgtgtgtgttgaactaaagaactggtaggggcagttgggagggtgctggactgcagagagccctttagtgctgctccagtggacgtgcacatctgtgtttccactgagagttaatggatattggatggggaaaggttttcagctatgtgttactgtagcctatgactatgtggtatgagcattttaatttatttggtgttttgaaatacttttatgagttactctgacaacttgtcaaggatattttcctgagagaaacaaataaaagacaaatctcaaaaatagtttgctattaggattttatttgttgagatgttgaagatgtcttttcaacagtgatacatgttttggttctttgcaaatttacaaggcactcccaaaatgtcatttgtccctcattcttctattcttgatatcattctatgatcctgtacaggatgaaagcaactgagttctgaaggtagtaagtaacatgctgaggtcaaatgccaggatttgagtcaggttcatggggctccatgtcctgtgacctctctgctccaccaggctgtgaaagaatgactcttgcattcatgcagtcagtctgtgttgctgtaaacctgaatggtaaaatgacaaatgtagacacagagggtgtgaatcagctctattagcagtgactctgagaatagtcctttccctcctctgtcttccccttctctgtcttgcagcaagtgggaggacgaagcaggtttcataagagcagcgcccaagacccacagtcgcctagtgccaagtcaacaaccttactgatatctggatgtagtttcctgtgctctttgacacaggtgtggagattgtaatttgctgtgtgtgattgtttgcacttccttgattatgtaaaccagtggcttttgccaagaactcttcatgccctgaagctctgagctggttccctcccattggtggaccttatttcattttattgggaggcgtaactttcaggtcacagagcagtsataactacctgccagtgtctcttaggagtgaggtacctggagttcggggaccccaacctgtgacaatgacagcagacaaattggttttctttgtgaatggcagaaaggtaagtaggagctgacctttggttttgtgtcccttctccctgggaggggaaatgtgtcctctggcagagccatatcttgttctctgtctttcctgtcccctcttacttgttctgtctttctctctctygctttaaaggtgtcgctgcattttggtaacattagggaagaagaccttctcggggctagagcacagacaagatactcagaggccaaagaatgagggagagagaggcaagcagagaggcatctgtgagctagctgccaactctctgcagtagtggagattggcacagaatgagaaaggggagttgagttctaggtgagatttgaggtcatcaccacacttctatttctgtctttaatcaaatatatcctaaaatttacgttgctctctttacagagagaaggaacaggaatgtgttttcctgcttttatcaggatataagatgtacgcagcctttgattctaatatattatatatataggtttaacagccagtcctgattcactgtgaggtgacatatactgacaccttgtggcaaaccacaatttttttttcataaagggcatctccygcattccccccactccccacccacacacagtgagttctacatgtaagctgcaaatctgttacctacttgaatttaccttattggtacacagggacttagggaaggtgacatgggtaccagcccttggacaagagtgagaatctttgcaaattttaatgtggtgcagagagagagggggcaagcatattacatggtcactagcctccatttgccctcctacaacactgctgagatgctcatacctgttcaacttcccacttaggaatgaaaaggatagtaaaagagtcccatagttgcacattgtaacttactgtgtggactgtgcgtgatgaatgtgcccaaagtgtcccccaaagaagggcaattttatttgtctttctatattggcatttttgcattgagttgagaaacttttgatgtaattttgagtgacttttggtataattttcaagaacaataatgtgcttcactggactcctaggtcttaaatttccaggatgtgtttgggtgactgtaaaagaaatttcatgaactgtttcaacgtcagtgctccaaagattgatggactctctttgagtggtgcctttgggaagtgctggggaatggggacagccatgttcttctgggttcagagtttcctctctgagctgcatccttttcagggttggcacctggtaccaacccaagaagtagggcaragctttcaagtgtaagattttgcatccagcatttcaaacaacttctttccttcagcaattacattgtagaaatctaggaaaccattgtgcaattggctttctaggagagctacttacacaaagccatctctggaatttttattagtaatttttacattgggtaaacagctagattcaatgacgtccaaggtcatgtcttactctgaggttttattatttattaaaccaaaccattggttaacctgtaaaagtataagtttctgctcttcttcagggatggcttgctgttatgcactaaatctagaaagaagaatttcaaggtaaatctggcttggggaaaattattttcccttgcattttactttcactttaggagagtaattttaaatttttcgatggtaccatcacatcaaatcctattatttctagaagcttctactactgccagtttctgtgatgaatatccatgtttgtaatttataatgatgtagcatcttcagaaactgcaagaaaggtagaggggcaatgcagaaagtaattatgtgaaagcaatgctgtaaaaacaagaccaagcaagggaattcctgggtaaacaatggcagctgtgagaaagttgtcctcatttttattcagaagatattctagaccttttgttacaggaattgtgcaaagtagttaccaaagaagctgtaagaacttagtgactctttttttttattattatactttaagttctagggtacatgtggacaacgtgcaggcttgttacatatgtacacatgtgccatgttggtttgctgcacccattaactcgtcatttacattaggtatatctcctaatgctatccctcccctctccccccaccccacgacaggccccggtgtgtgatgttccccttcctgtgtccaagtgttctcattgttcaattcctacctatgagtgagaacatgcagtgtttggtttttaaatgtgagcctactcctctccttgttttgtaccactgtccaggactctggcttcactaaatggggtcctgcagaaggtgttcgatgcaagaagtcgaatacctctagggccttctgtggtggtgatgagccttgatgactattgttttcattcacatcttcttttgttctagagtcagagtcaaagggaaagagctgtccagtattttatttttattgtaatgacagcctttttgcaaggcagcattctagcttttctgagtagtcactctgtctagctgagactgtggcacctggaagaatctgggaggatctggcaggttgggtgcagccaaaggtgtccaggagtgatccccacaagaagtgagtgtcagctacagagatcgtcacggtgactttcactcactcactcactcactcactcacttactcatcattcacttgctcactccccatatagtcaacatttatcaagctccttctgaggcctcagacaacaggatatgcactgggggaataagatctccaagatcaggcatttgccattctggagcccatatactagttagagagatggattataattagacaaagtaataccttctgaaatgtatttcacagaaaactagcagcatgagatgctcttcttggatattcttaaaccacttagcacagtgcatggtatacagtaggtgtccaactagtgtggatggaataagtggatgaatttttaaaactttgagaaatcctgtagtaaataaattacttctctaactttgtattttacaattattttatatttaaagaaaaactgcaagaagaatacaaggaaatactaaataccctttatgtactttaccaactgttaatgttttgccacatttgctttattattctctctttctcactctggacacacacacagatacacatgtatgtattataagtacgtaaataattctatatattaatgtacataattaatataaatgaatatatagtataagatagatttctgaaccttttgacagtaagtttcagacatcatgttcctttagctcttatcctaagaataaatatattctttttttttttttttttcctgagacagrgtttcactstgtcgcccaggctggagtgcagtggcgcgatctcggctcactgcaaccttgcckcctgggttcaagcaattgtctgcctcagcctcctgagtagctgggattacaggcgcccaccaccgtgcctggctaagtttttgtatttttagtagagttggggttctaccrtcttggccaggctgatgttgaactcctgacctgtgatccacccacctcggcctcccaaagtgctggtattacaggcgtgagccaccgcgcctggccagaataaatatattcttacaaaactgtagtccatttatagaaatcaagaaacttagctttggtgtaatactataaactttatgcaaatgtattccaattttcccaatactggcatttataactccccaaccccagcccggaatccaagattacgccttgcagttggttgccatgtctttagtctcctctaatctagaacagctcctcagctttcctttcatgacattggtgtttctgaaaagaacaggccagtttttttttagaatgttcctcacattgaattgtattatgctttcttgtaattagattcagagtctgcatttggggggcaggaataccacagaagtaatgtgtttttctcactgcattctgtcattatgtttgtttttttaacgtcagtttttgggtcttttttgtgatgcgaactttggtgacttggctaaggtgttatccaccacgtttcttcactgtaaggtaacttttctttacctttataattaatagaggctatgtgagaagataatttggaatgatacaaattcttgttcatcaaattttcacccactaatttgagtatccattgatattctttttttaaataatttttattgtggtaaaatacataaaatttaccatcttaatcatttttatgtgtacagttcagtggtattacatacattcataatattgggcaaccatcatcaccgtccacctccataacttctttcatcttttaagacaaactctataaatttactaaataataactccctattctacctttctcccagtccctggaaaccatcattttttctgtctctatgaatttgactaaactacctcacttaaggggamtcatacagtatgtctttttgtgactggcttatttcatttagcataatgttcacctatkttgtagcatatgtcaaaaattccttcctttctcaggttgaataatattccattgtatggatgtatcacattttgcttatccattcatctattgatggacattttggttgctttcacagtttggctactgtgaataacgttgtcatgaactcaggtgtataaatatctgagaccctgacttcaattattttgggtataaatccagaagtggaattgctggatcatatgctggttctatttttacttttttgtggaactgtcctacttatttttccacagtggctgtatcattttgcattcccatcaacagtggacaggtgttccagtttctccacgtccttgcaaacagttattttctgtttatttgtttgttcgttgatcatagctatcctaatgggtatgaggtgaaatctcattatagttctgattagtgatgttcagcatcttttcatttatttgctggccatttgtagatctttggagaaatgtctattcaagtcctttgcccatttttgaattgggttttatagttgttgagttttaggagttctgtattacacttgatctcatagtcactgatggctcattgcaacatttacataaaaaccagaagaaaagagaagaaggggagatggaaagacctttaatttttaatttttgggggtacatagtagatctacatatttatggggtacatgagatactttgatataggcatgcaatgtgtaataattacatgatagaaaatgtggtattcatctcctcaagcatttatcctttgtgttacaaatgatctaattatacttttttagttatttttaaatgtacagttaaattattattgactgtagttattctgttgtgttatccaacactaggtctttttcattctttctatttttttgtacctattagccatccctactttcctcttaccccctactaccctttccagcctctgataccatccttctactctatctccatgagttcaattgttttgatttttagctcccacaaatcagtgagaacatgtgaagtttgtctttctgtacctgacttatttcacttaacgtaatgacctccagctccatccatccatgttgttgcaaatgacaggatctcgttcttttttatggctaaatagcactccagtgtgtatgtgtaccacattttctttatccattcatctgttcacggacgcttaggttgcttccaaatgttggctgttgtgaataatgctgcaaaaaacataggagtgcaggtatctgttttatatactgacttcctttcttttgtgtatatacccagcagtgggattgctggatcatatggtagctccattcttaatttttgggggaaacttcaaactgttctccatagtggctgtactaatttccattgatgattcttaactggatcaattgtgttgattacaagatggccaatcatatttattagatgacattcttctgccaggaagagcttttccatatcttccatttgtttgtttgttgactctatttggactcataggttttaattgtatttaatgtattatagcccattatggctgttatttcttttgatgctcaagttttaccagagcaatctgcttaacccaacatttccttaactcacttccctacaaaatgtttttcctttgggatacccattggtatcctgttgagagtgttcaatggagtgcaccatggtaatcctgctgtcacaccttgagagtggcacagtcattctctatagcaatccacttgtggctggagtgataaggaaagcctttatgaagaaattgtttgaagtcttctgataagtcaaaatgcaggtggaagaggaatggcatagtcaaaggcacaggaattagaagatataaaatgtatttttagtgcactaagatgaccagcttggcagggaagtagaagggagaaaggctgaaaatgaagattgggaatatattgaaaagggccttgaaagacagcctaaggaacttggatgttaccttgaatatgtgggtggtcatgaaaagcactgagcagggaactgatgtgatgtgataaaagcagaactgcagtacrggagaaatgaacaatgtggtrgtaagctaagaggctcttaatgttgtctacaagaaaggtgataaagattgctattttgtgcatttatgattacttctatgatttgtaaccaggatattgaataagctggactcatggggtgtaatcacataagaaaattaatttcatctactttcctttaaactttattcaaaggacaaattctggcagtttcatgaactttttattactcttagtcaataaaaaatcttatggttatttttaagttgccaaacagtctcaattcaggacggcggggtgaggatagcaagaaagctctcctttaattggtactattgtaagatggcttccggctttctgagccttttaggtgtttggagctgacctttcattcttcttgtgatggctttcaaggatcttcaagggccaccacagggaatatttgcatgcatgtctcatgatatgagtgatgcacttttctcagrctgctgttctccatcagcctccagtttggggaagtccactccacacagtctctctttattgaatgctctatcctgtattttgggaaatgatttaaagacctccaagccagctctttttatctcatgaatggcttgcattacatccataggcgacacttccacatcctctgctctaccaagctccgggagtgtataccaaccccagcacagccacctctccaacttaagtttaatgaggagtttaaacttgtcattgtcggtattaatttcttgttaagcctatctcttcccctatgctgcaaaggtggcatgttagatttttatgtagcacaaagcaagctccctcactaagtttgaggtgggaggcaaatattcctccccttctcctttaggaaggtgtgggtagtatagttccctccaacgaaaaccttatcatgaattctttctctttattatcccaataatatacacccttttaagctttggtaatgtgtgaagagtactgaaatcggtttttgtagatttcctttgacaattcacagtgggaactgacatcgcactttctagaccactttttccaccttattgaacctagtgatggatctttggtttgagatttctctttcatttctgacatgtattagtgttgactaatacgcatcacatgccaacactctgctctgagcacaggccaacagaatggccttccacagtcacatgcaggatctgagattgtatactcaaagaggcaaagtccgagatctgcatgccatgctctcagatgcccctgaaattcacaggtgtgatctagcagttgaaatgagatgacaggttttatttgaaggggatttggccttggtcgagccagcgtggaaggtgcaatgcctgcatgttctgtggtgggtcccaaggtgagcattgaggtacaattttagaatttaaggatttgagtatatacattgtctggctgtagtttataggttcattcttatggagttgccataaaaataccttagttttcatgatctatttagcacattgtattaggccattcatgcattgctataaagaaacacctgaggctgggtaattataagaaaagagatttagttggctcacagttctgcaggctgtacaagcatgacaccagcatgtgcttggcttctggggaggcctccaggagtttttactcatggcagaaggcaaagtgggagcaggcacatcacatggccagtaagagcaagagagagagagaagggggtgatgccacatacttttaaatatctcgtgacaactaattcacaactaaggggatggcactaagccattcatgagaaatctgcccccatgakcatattgcttcccactaggccccaccttcaacactggggattacaattaaacatgagatttagaggggcagagtscaaactatatcacacttcctactaactctacaaattattgagtgagacactgaaggaagaaattaattgcagaaagatgactaagtatacctatgatatatttttctttcatttattttaataggtggtggagaaaaatgcagatccagagacaacccttttggcctacctgagaagaaagtgtatcctgactttggagtgggagtgayggagaaggggggcaatggtgactgattctgtaggccttacmttgtttcctagtgactggtggggtggccttgaggtgtggaggaaagagcactggattaggacttgggacacttgcattttagttgcacctgtaatctgaaattctcagctactgaatgagaggattgtttgtggtgatcttcgaggtgtctccccgctaagactctagtaatgccaaggtttaatccagggcctgtagaaaggtcctcattagccttggtgagcttcatggtcattcctctgtgggaagaggggggccttccttaggtgacatttgcttaatacataaatggagttcctggggaatgtttccagctctgcctaggtggagggaagcaagggaacatgtgtctattgggaaaaggatgcgtgaggtaagaatcctatacaggtagcattcattgtagaaacagcaaacagggagccctggagggtggggggactccttagaaagactggggtgctgctcttcactcagtgtgggtggggcttctggaaaagcccctttacctttagttctgagtatcggaagtattctgggaccctggaactaaaacgataataataattggagttaatatttaatgagcacttcctatatacaggcaggattcaaagtgatttgtgcagctcacctcaatctccacaggaatcccatggaagcgtaacactcccttttcacagaggaggaactgaggccttgatatgtgaagtgacctgccttttgctagtgtgttctggggaaatagtgatggagaytgcaccaaagcctagagctgtgttcccaacctctcacccgcactggcaactctccagggggcctgtgagcaggactgtgctcatcctgacctctgtcaacaaaaccctccttctcctagcgggggtgtctagtgggtctttccagtgacatatttggggacagcaaagattattataacacgcacagaagtgagactggagcccatgctttcactctggtttgctcccctcctatcagacagtacagtggttggctttggtgtactttgttctggattttttaccttaagtgggtgtatctggaggttcacagaagataaacctggtggtgctggggagtgaaagtgtcactagatcggatcaggtgattgcatggaactccatttacagcccatctacctgggaggtctgggaagagaagctcattctcagagattattgagatcaattttagctttctaataataaaacaaattttaattttttaatcatttccattgtagttttgaaggcccagaagcctcagaaattccttatcagcaattggctgtgtcacatcttaaatgaaatgcaaaactgaaagttggcacataagtaggatgaccttgcagcttatggctatctgtgctgagagtcaatttatgggagttccagatgggggagaaaactccagccttgacttttacactagcttccagaaaggtctccaggctggaagaagaccttgctagactttgtactgccaccattcatcttcaggtgccaccattcgtcttcaggtgcccccaaagttgtttgacctgctgagagctgcatatatcctgactaggacacagaaaascttcccaggtgtgctggggaggaaggagcgtgatgaagggagctcacccagtctggagtccgatggctgtgatggggccacaccggcagggtaacgtgttcctgtgtcatcttgtgtggcccacgttacctcttgggtctcagtttgttgttttttttaaatctgtgaggaagtttctttcctacctgctaaccaaatcattctggaggtcaaacaggtatctaggtgaaagtgcttttcaaaaataagatgttatatcattgtttttaaattttgtcttgaaaatgagagaagtgaccaggcgattatatcctcagttccctccatcttcagtaggtagtgggtggcttagaggcctgcaggtctgagggagaagcagccatgtgactcagggaaagtgacctccacaatagctgttctctagaatagcttaccagttaggcacttttaaaactcaaagtagcagatgntctttctgcaagtatatgtaagagtgaggcccaatattggacccagacctaaaaaaaccactctattttaatttccattcacatatcttttggaccaaatattcaaaagcctctggtctagccctaattttgattcttggggacttatcagcccaaaaagttcagagtgaaaagcaaggactcagaggtcccagaacagatcaatgtctcattctggcccaagtggcttcatggtgtgcccagctgggagygatgtgagaactgccccgtatgctcaggtgtatgatttacctgctcacacatagaagacctcaacccaagagaaggctctaggactgaccagtcctagaactcatgtcccaagagatgctacttgggtgctgtccatggggttctgatgcctttgctcttctgtgcagtggagatggccgtgttccctgcctccctagggtgcagtgcagcccctctgaataaggaggccagtgggcctgctgccttccttggttgaggggcctgagcacgtgtgggaatgaatggctctkcccacagctctgcccaggcatttcctagcaacccagcagactcctctcsctgagttcattctccttaactcttgaccacccagtggggctgagtggaaccaagctcggctgtggagaggggggctgcggggcttgcacagtgatgctctccaagtatgatcgtctgcagaacaagatcgtgtatcctttgcctgctggctgaccacccacatgggggctgcgatgcaggaccagcttgtgagggagtgcatgagtgtatgtgtgtatgtgcatgtgcgcatgtgtgagcycctgtttttatggagaatctgtgcacaggaaaactgtagaatgatctcttagcaagtatcttctaggcttataatattgaccaggctccgaactgctgataaaatgacttttctaaaatccacatttatatcacattccataaagcccttcaatagctcttcattgcccccaggacaaaatctctttgcttagmgggcaaggccctgcacagtatgccccaggtttcttctccagttttctttctcaccatgggcccagcactccattcaagcagagataattgtgaaataccaatgacacaggcccactaattgcttggtctttgtttaagctgggaagttctcctaggatttctctatctgactaactcttactagctctttacaactgggcaaaaatatcaccccctccaggaagccatcctggatctctcaagactgggttaggtgccccttgactgtgctggtcccatagtgccctgtgcacagcattcccaatgtaaactcaggcatgatacaatttttacagtttatttgagaaaacaacagttcatgagctcaagcagctccacattagaagcagttcaggagctccaccagggaaatgcaagcaggaggtttttgtaggatggacacaggcaaaaagcaaagaaattatttgattggttacaattatacaattgccttacttggtctatcccactggaaagtccctagtactatagttataagtttgttgactacttctgattggttgatcgtaaggcttttttttaatataaagatattcgtaagaagtagctcaagttaagactctgctgcaaatcaagcacagtttaggtcacttgtgaggcctaactggtttcctctgctgagtcttcaggcctggtctcctttttaatttactttaacaagatttaaattgcaccttcatatggactttggttttctcagttgactgcagtctrttgaagggcagagctttcatcttattcatctttattttcccagccctcagcagagtgcctgacttatgtctggcactcaataactgatgctgaatgtaagtgaatgagtgatgaataacagaagaatgcaaggaagttctagctaagggcttgctgtctcatgttgcctgggggtttcctccccctttccccacagagaaatgaaagcaatagaggcgaggaaatgcagggaagcaaagtgattggaagctaaggaacagccctgcaggcaggagcatgctttaaggctgcagcctgccagagaaatttcctcttgactcagcctcctgggtcaggctgagtaagaggtgactgaaagtgaccctggctccgttgctcctgctcagaggctgaggatgctctgatgcctgatcccacagtactctggaggggctcagctttacctataaggagagcttcctttgttcctttcccagagtcttcagtggagaggtgaggacactggtagaagagacaagaacataaatgggagcggagagacgtaacataaagcctcacaaagtcctccagagctcacagtcaggcccattctgatgatctgagtggacaataaatggaatgaccttaatctggggttctagccacttttctgccaatgcctgcctggcccccatctgctccttgcaccatgttgcagtgacaactgtggaaggaataggaagcaccaagacgaggctgcatcctgtgcaggtaaacagaggaaagggagctgtgctcttgagatcaggctctttcctctgcagggaggctcatgccaaagttgcagacttgctttgggttgttgggaagagtttcactgcttaatctaagaaggcatttcaccctggccacctccccatctcctctgggtaccgtgaggtgaaaagaagaaacacccaagcctgaagctccttcctgtgagctggttggttataacattgcatgatctgaagggacccaagaggccaactgaatctggtggctagaccagtccagaacttggaggaagggatgcagaagagcttcctcactttgttctggagtgtgtttaggaaactcccagccttcccagatttgaattttaattatctgtgccccttgtttataagcccacttactccctgcaatggtaattctgcaccccttacctcccacccgcagatagtacaaatgtaaactgctaggcctcctctttcattagactggaggttagcaagtgctaaataagatgacagagatttagtgcctgagcaaggctttctccttgatggtatcagaccacctgaaaatgcattgaaatccgaaacatttctggggcaaatgggcagtaataatcttagactggtttggggagacaatcaggatgctgttaggctgagtggaaagaaaggggagtagagccctgttggaaggaacggccattgtccccaaagcattttgtttgaggaaacttggggtctttgggagatcgagactatcctggctaacatggtgaaaccccatctctactaaaaataccaaaaaattagccaggcggagtggcgggcgcctgtagtcccrgatactcaggaggctgaggcaggagaatggcgtgaacctgggagatggagcttgcagtgagccgagatcgtgccactggactccagcctgggcgacagagtgagactccatctcaaaaaaaaaaaaaaaaaaaagaagttaccagagcttggcccaggtcttaatcctcccttgattatttgaggagacatgtcattcaggcgatggagctggagcctcctgcggagaggctggtactattccttggagtggcatcttgggccagtcatgtgaggccagccaggtcggggtgggattgcttcccatctatagatttgtttcttaggcaggaagaggggaaattactaaacttgtccaacctgaaggagacgtgagagggttaattaaggcttgttattttctttgaaacaaacagatgaaagaaagaataaayagtttaaacataggagtcaagtattagtctattctcacactgctgataaagacataaccaagactgggtaatttacaaagaaagagaagtttaatggattcagttccacatggctggggaggcctcacaatcatggcagaaggtgaaaagcacatcttacatggtggcagacaagagaaatgagagctaagtgaaaacagaaacccttcagatttcgtcagatttattcactaccatgagaacaggatgggggaaccacccccatgattcagttatctcccacagggtccctctcgcaacacatgggaattatgggggctacaattcaagatgagattkgggtgaggacacagccaaaccaaattaggttgtatctgtataatcaacctaaaatcctccctatccaatggtacaggttcttattcctaatcaacttattttggctacaaataggcttcagagccagattccacttcttgtccatttatttgttttctcttggtttctgtgacactgtggttctggcttttccttctctccccacacttgctcctcctctgctcagtctctaattgctgcagkgccctgagccctgacctgggcccctccccttcttcatccctatactctcatttacaacttcagctttgacctcccctcagaagttacatttccaattgcctatttgacatctcaatacggatgtctaatctcaaacttaagaaaaccctactcttttcctaatggcttccttccccagtcttctcccatctgagtcaatggcaaagccatccacccaattgctcaagacaaaaatctagacatcacctttgactgtttctgtcatatgccacacccaatccattcagaagctgccttctggttatgatagtcactgttctttgaagggaccttcctagtcatagctaacactggctgactgcctgctatatgcaggtacagtgttaagggttttacatgaatatctcagttaatcctcatcgcagctctagaggtaactacaaggatggtcctcatcatacagatgaagaacctagactcagagggcttggaaactggccaaggtcacagttggtaaatggtggcactggggcttgactctgtgcagtgattactacccccactatctctcaacatgtgctggctccagtcgagtcctttggggagcctgggagggttctgccrtcccaggtgtctatgtcatctrtatcttttaggagagaattgccaaaagccacggctcccagtgcgggttctgcacccctggcatcgtcatgagtatgtacacactgctccggaatcagcccgagcccaccatggaggagattgagaatgccttccaaggtatgggccttcaggcacagcctaggaggtggaatggcaaacgaggccctgcagaggtcagggcaagtgccagggtgagaagcatgagggactaccctttggaggaagggctcaggccccccaacaaggtggtgactaagatctgctagaaagccaaccctctcttacttgggagaactcctggttggtgtggagacctcctggggtctcctgcctttgtgtccatatttctgaggtgtctgtctgccttccaccagtattggagtggggttggcagtgcatggctggtgcaggaagacgtcatttagaaaactccacgggggctagtgatatgatttccttccctctcagttttcaccagaacaggattctgcagggccaagaccaccaatgtgtctgcttctctgaattgaatagagaagcctccccatctattcaccatttccatcatttattcagttattttagtcacatcctatgccacagggataaaagacacaccctctactctcaaaaagttcatactctgaagaggagagtttgtaatgtagtctgataggctaactgatgaagctgtgatcagccactgtgggagcacttaggagaggtacctgactcagtctgggcattctaggaaggcttccattctaggaaagacttcctgaaatcatgataacttttctgaagtcaggatatgagaaggccaagaggccttccagacagaggtaacagaatatgcagcctggtaaagagagcacccaacttagttgcaagcaaagtcacaaactcctcacccatcccagggccctgcactgacattgcagttttttccttggcccacaggaaatctgtgcygctgcacaggctacagacccatcctccagggcttccggacctttgccagggtaagtggggaccccagaacatcagtgtctctgcttctaaaatggcaacactcagaaatcactgtggggagggagaccaagggcctctggtctacaaacaatgatgataagatgaccagttagtgagtcttccctctggggacatctggcatggggagtagagtctgccattcttattcagggaagggttcttatgaatagcatgggactttctgccagtgatggtctggagaccggcttcctggaagaggctcaccgcctgagagtgcctttgagcttggcagtgcctttgggcttggcagctttcccttggagactggcaggctcagcccatggcacaggtgctgaatgtagcatttaataacaacgtggccttgctcagcacttgcacccctcctccttccctctcctggctgctttctgtggctggcactctgttgggcttatgaaactggtaattagatctccagacagtttgtgaacccctgcaatgttcatataactctgagtgagaagtcacagccggatgtgtgggcattgattatataaacacatacacacacctgccatctggcaaggaaggcagagagctggcatctcctttcttggcttaatctccccccaggttttacttgacttctcaattgggccacgttaatcytgactccaaatcaaaccatctcatttcagtttgattctgggtccaggggagttacagactcctgtgctttccactcacctttagggttggagcatcatgaaaaagagtgctgtgtctgtataatygtataatccaagaaggggtgggtaaacaaggagacaggaccttataaggatggaaaacaccacactctgattaatgctgctgctgatgaagaattaacaagtgtggaattaaatgaaaatgcctaaaagcacaaattcagattctgcagacctgggttcaatttgaggcacttaattgatgcacgaccytgggcaagtctccttgtttctattaggttggtgcaaaagtaactgtggttttgccattaaaagtatgggaaaaactgtaattatttttgcaccaacctaataaaatggtgattttattaggtgatttcattagaatatctaccttactgtgtttataaaaattaagtacttcttgaaaagcttttagaacaatgcctggcacatttctgttattcaataaatgggaactataaattatgaagctggtatatttcttccagtagcctctatataatcttcccaagttactcastgtttcctgagacccagagattgttaatcttgcctctatttacttcataagaacctgctcaaagtgatataatgtaatcagtcctcttaatttttcaaaagagaaggatttttgagtatagcagttgccttccctcctggaagttgaaatcgctcttgatttcacyatgcagaacttacctccctcaattcagctaccctgcagtgcagagcagagcaagactgagagctctgagcagccaaaatgcctgacacacaaaaggtgctcagaagctaatgcatgttactcatcggaggtctccgagatgtttcttcagagcctttttacttttattttacacacagctctaacaaactcggttactagctttcctgtccacagcacacactagaaagcgtgtggagggtcaactagaggtgggcacactgctcacggcgagaagtgaccacagctatctggtgacaaggaaagaaatggaggaaccattaaacaggtacaagcaagacttccagtttctggtctggcatgtaagcagcttaggagtctttatttcatctaaacaagaagaaaaaggctgaacaaactgaagaatcaacagttgtttttagatccatcagaggaatgaggtcacaggacaactcattgtccaaaaaattggagagacagacaggcagacacggcatatcagagcagaaacctctgcaggaacctttgccaggataggaagatgtaaggactaactgatgaattgctggagtttatacatggatataaactccagggggatgcagtcatggagcgggtgctctacacctttgtgagttttacctccaggatctccaccaggtcctcacagtaaatgttggagaaaaatctccttgtgtttctggtagggagtgggaaaaatgaaccattttggaatatgccagagcattctgttcttcttaaaaaggcctgtcctcagaagaaattattttaccgcagcctaaacttctgaggttatattagatcctcgcctaccttggggaggggaaatacgcaaccccaggacctttagtctttcacctgtgggaagggaaatacacaagcccagccccctccagccatcctgtcccaccaaacggagaaaaaaaaccctgagaagcgcttgtgaagttcacaggtgagcggcacaagctcaccaaaaaactgagactaatcctaggactataggatacttctccttcatatcttaccaatacattaactaaaggcctatttatatgaggtcttttcagccagtacatcatgtccacctttcaaccaaaaattataaggcatagtcaaaggcaaacacaatttgaagagactgaacaaacagcagaaccagagtcaaataggacaggaatattggaattaacaaatgaggaattttataaagctatgattagtatgctaagagatttaatggaaaaaatagataacatacaaaaacagatggataatgtaagcagagaacggaaattctaagaattaaaaagaaatgctagagattgaaaacgcttataacaaattgaagactaccttcggtgggctcattagtagactggacatggctgagaaaagaatctctgagcttgaggatatgacaatgcaaactttcaaaaccaaaaaacagagaaaaggaagtgaatgaaaacaaacagaaacaaataagaactgtgtgataactacaaaagatgtaacatatgtgtaacgagaatatcagcagtaaaagaagaaaaagagaaaggaaaagaagcaatatttgaaacaaaaatgactgagaatttcccaaaattaatgtcagattttaaaccacagagtcwggaaattcagagaacacaaaccaggataagtaccaaaacccaaaaccaaacaaaaactataccaaggcatgtgatattcaaacttcaaaaaatcaaaggtaaagaaaaatgacttgaaagaagccaaaggaaaacacccctcacctatagaagagcaaatataaaattatatctgacttttcccagaaaccatgcaagcaagaggcatggagagaaatacttaaagtattgaaagaaaaaaccaaagcacctaaaattctgtaacctccgtaagtawccttcaaaagcgagtgagaaatattttctcaaacaaaacttgagataatttgttgccagtagacccatcttgtaagaaatattaaaagaagttctttaaagagaaggaaaatgatgtaggccagaaactcagatctacataaaggaagagcatgagagaatgaacaagtaaaggtaaaataaaaatttttatttttcttaatcttaattggtctaacagatagcaatttgttcaagacaatcatagcaaccatgcatttgtttatgtgtgcatatgtatatatatatgtgcttgtgtataagtaaaatgaatgacaacaatgataaaataaacaagagggaaaaattagaaatattttgttattataagatacaatcactacctgtaaagcggygtagtgttatttaaaagtggacttggattagttaaaaatgtatactgcaaactctagggcaactaccagaaaaaaaaaaaaaagaaaaaaggaagtataattgatactttatgaaaggaaaggagatgaaattatatataatgctcagttcaaaccacaaaagtcagaaaatgagtgaaagacaaaactagaaacaaagaataaggacgacaaatagaaaacaataacaaatatggtagatactaatccaactatatcaatgattaccttaaatgtcagtgatctaaatacaccatttaaaagacagagattgttagagtagatgaaaataacaagacccaactatatgttgtctacaagaaacctactttaaatgaaaagacacagatagattaaaactaagtagataaagaaaggtggaccatgatatactaatcgaaagaaagtggaagtagcatattaattttggacagagcaaacagttatcagagaaaaagaggggcattaaaaataataaaggaatcaatactccaagaagatataacagtccttaatgtgtgtgcacctaacaacagagcttcaaaatacatgaggcaaatctggtggaactgcagagacaaatagatgaatccattattatatgtgaagacttcaacacccttatatcagaaatggacagcaccaggccaaaaatcagtaaggacatagttggactcaacggcaccatcaattaattggatataattgacatttatagactactttagccaacaacagcagaaaagacatttttctcaagctcacgtggagcattcacctagatggaccacattctgtgctatgaaacacacatttacaaatttaaattgcatgaatagagatcatacaatgtctgctttcaaaccaaaatgaaattaaactagatatcgataacagaaagatagctggaaaacccccaaatgcttgaagattaaacaacacaattcaaaagaacacatggtcaaaaagaaaatctcaagggaaattttaaaatattttgaattaaatgaaattgaaaatacagcttatcaaaatttgcaagatgcagtgaaaacaatgcttagagggaaatttatagtattgaatgcatatattagaaaggaagattaaaaatcaataatccaccaggcacgacggctcatgcctgtaatcccagcactttgggaggatgaggcgggcggatcacgaggtcaggagttcaagaccagcctgaccaacatggtgaaaccctgtttctactaaaaatacaaaaattagccaggcatggtggcacacacctgtaatcccagctactcaggaggctgaagcaggagaatcacttgaacccaggaagtggaggttgcagtgagccaagattgcgccattgcactccagcctgggtgacagagtgagactccatttcaaataaataaataaataaataaataataaaaataaaatacaaataaaatcagcaatctgggctcccactttagaaaactagaaaaaaaaaggcaaattaaattcaaagtaagctgaagaaaaataaaatttgsagcaaaaatcaatttcattgaaaacagacaatcaatagagaaaatcaacataactgaaatttgggtccttaaaaagatcaatgaaattaataagcctctggccaggctaactaaraaaaaaaagagaagatccaarttactaatatcaaaataaaaagatctcactatagagctcatgtacattaaatggataatgaaggaatattaagaacaactctatgctcatatacttgataacctagatgaaataaaacaattccttgaaagatgtaagcyaccaaaactcatacaaaaagtagataatctgaataggcctataactattgaagaaattgaatcattaattaataacctttaacacagaaagcaccaggcccagatagattcactggtaaatcctatcaaacatttaaaaaagaaattatgtcaattctccacaatctcttccagaagatagaatcagaggcaatacaaaagttaatcactttcatatgtaacagcaatgtataagtggaacttgaaattcaaaacacattatcatttacgttttacattaatactctccaacaaatgtaatacttaggtatgaatctaaaaagtgtgtacaagatttatgtgagaaaaactacaaaactctgatgaacaaaatcaaagaactaaacaaatggagagatatttctttttcatgaataaggagactgaatatgtcaagatgtcagttgttcccaactgtagactcaatgcaatcccaatcaaaatcccagtaaattattttgtggctatcaacaaattgatcctaaggtttatatggagaagaacaagatccagaatagccaactcaatattgaaggagaatagagaacaaagtcagaggactgacactacccaatttcaagatttactacaaagctgcagttatcaagacagtgtagtatggacactgtccatactacaaaaagaatggacaaaagaatggacaaagagatcaatggaacagaatagagagcccagaaatagaccaacataaatacagtcaactgatgtttcacaaagaagaaaaggcgatacgatggagcaaagattgtctttttaayaaatggtgctgcaacagttggacattcacatacaaaaaaaaatgaatctaaacacagaccttatacacttctcaaaattaactcaaaatgaatcataaacctaagtgtaaagcaataaaactcctagaagatgacayaggagaaaacctagatgaccttggaatgatgatgactttttagatgcaacaccaaaggcatgatccataaaagaaataattataagctggacttcattaaaatttaataacgatgaatgaggagacaagcggtacactgggagaaaaatatttgcaaaagacacatcttgtaaagtacttatccaaatatacaaagaacttataaaactcagcaataagacaatgaacaactaaattaaaaaatgggtaaaagacctgcacagctacctcaccaaagaaggtatatggatggccagtaagcatataagttcgacatcatatgccattagggaattgcaaattgaaagaacagtgaaataccaccacaggtctattagaatggtcaaatccaaaacactgacaacatcagattctggtgaggatgtggggcaacaggaactctcattcattgctggtgagaatgcaaactgcacaaccactgtggaagacaatttggcagtttcttacaaaactgaacatgtcttatcatgcacctcagtgatcacacaccttggaactgactcaaaggaatttaaaacttattgccacatgaaaacctgcacaggcatgcttacaacaaccttactcataattgccaaaacttagatgcaaccaagatgtccttcagtaggtgaataaactgtagaacatccaaayaatggaatgttaattcagtgccaaaatgaaaggagctatcaagctatgaaaagacatagacaaaccttaattgctactactaagtgaaagaaatcaatctttagaagctacatattgtatgatatctattctatgaaattctagaaaagacaaaaccatggaggcagtaaaaagactagtggttgccagtgattaggggaaacagagggatgaatagtcagggtacagaggttttttagggcagtataactctttctgtaagatatcataagggtcaacacctgtaatcatgcatttgtcaaaaccaatggaatgtacaacaccaagagtgaaccttcatgtaaattaatggactttgggtgataatgatgtgtcaatgtgggtccatcagttgtaacaaatatgccacttttgaggatactgaagtgagaaaggttgtgcgtgtatgttgggataggggtatttgggaattctctacatcttccactcagttttttctgtgaaccttaaaccactctaaaaaaaaaacytttttttttaaaggcaccagtgcagaagccttagcctatttagtaaagtaggaatctcaggagggtggggatgagaaaatgtagtcttatccaacctcaatagaccttgagggcagtgatgcattactgtacatcacagtaatttatgtcattaacacaccaatgaattatcaagaaaatagatctaagtaataatgcactggcactttgtctggaaaaggcgcttctgtgaaatatgtccttcctcagagggccaggtgagtgggatgcaggactttcacttcaggtaggccagggcatttccctacatcactccttctccaagaagaaaggtgagaaaaggcactaagaaacctctctttcttcctttctttctttctaaatatagaggggaagtgcaaggtggctggctggggggaggctcagaatggacggagcaggtctggtgtccagtgctggagctgtgaatgcaggaagagtctgcacacggagcagcgtgtccaggtggtggggtgggtggggtgtttctctcctgatgccactgcctgcctgcttacaacttctccaaggtcacacctccagcatcccatgagtgctttcttgcagaagacaacgagttgtgaaacagactctggaaaatgccagcatggcatggtgtctcctgtggctgacttgcagaaggactgctcccagcctgctttttcaggaattgactacccgataaaagtgcctgaggcagaacctatgagtttcccctactttttcatctcagcacaactccaggactctgtcttctgaagccctgagctgcagatcagtcagctgagtgcgcccctctgccaccctgcagtgcctcggtgctgggtggtagtgattctagactctgtgtgtgctctgccactggtatcctaagaggtcctgagcaagtcttttcccagagatgctgggtggtctgacctgcatacttctccagaacaggcccacagtgaggagtgaagggtgtttacctttctgggaagaagtgcctaataagcagtagggaggccattgggcacactggctggacacagtgctgggctcagcacccgtcttggacatcctttggcagggtcctgcagagagcccagcctgggagacaccagccacgcccctagaaccttgctgatctggaagtcaagcctcttgagtcttgagagagccaatgggaatatccctcatagacgcttcctgaggaagcagcactgaagaagagaaatgggcataagggataggttttgataaagtaggacctagcttttatggagaaaagttcctgaaattcagtggccttgttgctcctatttgtttatccntgagttgtttaatctacgttagccaagcaagagggaatgtagcggaggcctccactctgggcaacaggcaggcaggatgcccctgctgttgatgctgggacaggcgtcagagctggagtgttctggatrttagtaatctagattccttagcttytgcaaatactctytgtaaatacccttgtgcagatgttcatcatctctctaggatggtggatgctgtggaggagatgggaataatccaaattgctgcatgaaccagaagaaagaccactcagtaagtgagttcttctccccctggaagcctgggggtaawctgagacttagaggagtcagtgcaygagctccatgtccctggcggtgggggctggaagaggaacctayggtgagtcggtgatggcagactgtggggatggtgatggtgcacgttagccccgggtcctgtaactgagactctctcattcctgcctcccagggattacctgctcctcttgcagcctgcagggggctgggaatgagcttgctggaaggaaaggctgaattggtcctcttgggtgtttgaaaggaggagatactgcatcacctacctgttctctttccccataggtcagcctctcgccatctttattcaaaccagaggagttcacgcccctggatccaacccaggagcccatttttcccccagagttgctggtaggtgatgcctcagggacagatccagccgggtctgtactgtgagtccctggaaacctgctttattttcatacccactgggaactttgtgtctttcttgtcctttatgtttcagcttaaatttcccttccattttctgacactcccctaggttgagtctctgctatgtgtacccacagcccctgcacttcagttcatgtgtgtcacagttacagttattaatttgatgtctgtgttccttgctaaatgacaagccccatgaggatagggactggctctctaggcacactgtgtagtgtagcaggttcactataaccatttgttgatctcctgcctatatctaatacataagcactccaagaaacstattccctctataagcaatccatttatttaaaacaaaacaaaacaaaacaaaaaacgagagctctcttcaaaggacatgatctgcagctcacagctctgtcttaaggaaaccccctcacacccactttatcaccatcactctaatatttatggcaacgaaagaatcaagccactcggagtttttgaagtgcacacttctcagagttttgagctatgaaaactaccttgtagcttcaacaggccagagagaatggctttgcagcaggccaccagcagatctttctctggactgtgaaactttgaaaatactggcagttygatttgagggcttcgttctcagcccagtgtcttcctgcaagcactaaagccagccttcctaggcatccccttataacaaactccttccttccttccttccttccttccttccttccttccttccttccttccttcctttcttccctccctccctccctccctctctccctccctccctccctctctccctccctccctcccttctcatgccttgtccatggtgccccctggagatattatggggcactgcaaggaatctgggctttcakccaggtctgttggggacccctcatggcaggtgaccttcagcaggtcccataacctccttgaccctcaggatcttctttcactggtgaaaatgaggctcataatgcctccttcatggaagtcttgtaaagactagtcccaatggagttcctgcctctgaacatattacttccccttgcttcttcctgttagatattttcattctgaatgtcagtaaaacatcccattgaggacttaaagcaatttataagaggaatgacagtaggaagagggagacaktgtagtaagaaaactgcatttcccagaggctgaaagacactcctcggaagcagctgcgatttgaaggggagcgtgtgacgtggatacaggcctcaaccctcaaggagctgctggacctcaaggctcagcaccctgacgccaagctggtcgtggggaacacggagattggtaagggccagggaggctgccctggggctgccagggggtctgggggtgtttctaggtcctcttgcccatcctcacctccccctgactttacttgcctctgcaccctatccctctgccccactgactacctggagcccactggaaatccctggacactccagttcctgcaaaggcccctagctgtggagtcccacaggcctggctcagccccttgctggatgtgtgacctcagaawagttgcttgtcctcatctaccctcattttctgttttttatatggggatactaacaactccttgaaggattgttttgggtgtgaaatgagatccttgcatgtagttgacttctctccacaaacatttacagagcaccgagcatgagccaggtactctggaaggggcttgggatacaaagctcaattggacntggttccttgccttcaagggccttctagtctaagggaggaggaactaatttaagcaaagtgtctaggccagtggctgatggacactagaggttccataaatgtcgcttttgaccccaccaccccactttttctgggggaggatgtgataaggtaaagaagaggagagctccaggtgtgactgtgtttgtgttgcctatgaccatggccacctgccctgtcagtgctaccacctaggacgtgaggcctggaatagttgaacaggctgggagactcagaatatgcacctctcagccccagtgctgtaagagatggggagaggttcccaggtccctgctaatctctgtcgatttctaaacctggcatggcctatttctactttgctggatcccaagcctagtgaggatctaaggaggagaccgtgggacagctgaggacctctgctgtggaggggcatgctctccttctaagcagtcaggtcctggctctggttcctgaaggagctgccaagccctgagttctggttggctcctcagccacagagaggagagcctggcttgggtcagtgctgatggagtcagaatggacgcctccctcgtgcgcacatatacataagatagagtccccaactgtggttttgtgacacactgaggcagcagggtgggctgagacacacctcaagaaatgtgatcttgatggccatggctcaacaggactcatggctcatgtagctcaggtgtagcttgatttaaggtggctgggggaatcttaggaggtccttctttttttttcctcaaagacagggtctcactctgttgcccaggctgaaatacagtggtgcaatgtcaccatagctcacctcaaactcatgggctcatgtggtcccccaccccagcctcaaggggatcatttcacacttgcatgctccctgccatgagccatccaatgtcctgggcccagttggattccaagagaaatgaataacaaagattacctaagttccacaattagaaatgatttctcaagaccatttccttctgcgccactcccttctctcttatacataccccaatagcatagtcacctccagtcaacgcagagtgttgggggaaggcagacaaagagaaaaccttagtaacgtagaacttgctgcttcaatctgtgttctttgtcctggaagctgatattcaaaaggggctggtattcaggtgcttctaggatttctgaagggagctttgaagattctggaatctggggatccacaaagcctagggcccccttcagaaatcctaaacagcacctggggggaagsgggggcaaagaggtcacaggtatttcttttttaaccttttccatctatacactgttggcagggctgggagaggtgctgagccaactgggtctaaggaacagaggcacacttgtttaacagaggcttctgactcatttagtcaggaaggccagaaaccacacacagatgtgtggccccgcaaagccagacaacttgaagaactcaggcagatagtgggaactggaggacagatttgaagttttccctcccattttccttttttgttttaatgttaaactttcatgtttttattacgattataccccaacacgaataatcattccagtactgaaatttggttattcttagctgtgtgatttgggcaagaaacttaacttttctgtgcctcagcttcttcatctataaacagaaaaatcrtagtacctcatagggttgttgtgagcattaattaagttaaaatagggaaagtgcttagaagggttcctgacataccttaatttcctgtgttttctaatgtacacaaacacacacacacacacacacacacacacacacacacacacacactagagtgaattcaaactcatttcatttgaattcaggtaggttttttgagagggaaagaaagacctagttttgggctgacagtccaaagactgcatctaatcccacccctggtctactgagtttcctattcccagacacctacagtcaccagagagcatattatgattgtggatatgtcatatatcctgtgtgtaatggtgagaaaagctgctaaggcctgccctggtgatacaacaatgggcctacaacttcagcttcttgtttctctctaggcattgagatgaagttcaagaatatgctgtttcctatgattgtytgcccagcctggatccctgagctgaattcggtagaacatggacccgacggtaagaggaggttcactccaagcttatggaggggctgtgaggctggggataggttacaaggtgggtggcaggtatcagggtggtctccccactggctctggctgccccctgcttctcctggggctcaccttgcacagggaaaggcgggaggagaccccattcattgctgaaacatccatggtagggtgccagtgggcaagaggctgcgggatcttcaatcatttttctcaattctggctacacattagaatcactcatgcgggggtggggaggtggggattgtgcctgagtgcttttaaaaagaatgctaggacttcaccttcagagattctgattttaatgagttgagaactactggtttagaggaaagagcattggttgtaggatcaagaggcccaagcttgagtactggctcttttattagctgtgtggcattggttaggtcactcaaccactctgggccctcatttcctcatccatggaaagctgtgagtcctgattcagccttgctccagttgctggaaagcttcagaggagctgtgcatgaaagcctcttctgaactgtgggaagaattgctgtgattccgaacgtgcgttcccaggtatctcctttggagctgcttgccccctgagcattgtggaaaaaaccctggtggatgctgttgctaagcttcctgcccaaaagacagaggtgttcagaggggtcctggagcagctgcgctggtttgctgggaagcaagtcaagtctgtggcggtgagtcgctctcagaagcaagcgaggcccgtaggatggagctttcatctgaaagcagggcagccagactctcactgtgtcagtgcagtgggcctcaaactttagcgcttagagttgcctgggaggagcagtgcttgttaaagtgcagattcctgggccccaccctcagagattctgatacatgggtctgggatgtagcccagctcttcaggtgcttctgatgaaggtggtctgtggggcaccctgggaaaygcactccacgactcataggcttcattctgtggttgcagagatgaggcttcctgcctccctcccccttcctgagcttggctgagccaaacagtaggtgaacaagagatatggatatgctagggagaagtcagaattgagaggggaatttcctttcagagctatagggaraaccagagacagagccctcccacagagggaggaatacacctgttgattattcagtcagccttcagacaagtccccacattcccagtttgcaaatggtggcattcgaacaccctatgccaatggaagctcttcacaacagtttatggtgtcggaagaaaagctatctcttccatttttaaattgtttttttaaattaaaacaaaacagcctactcctattcctcccagcccccaccccaagtacctgtcacttctgattatagataaggaaacataaactgtagataaggaaacataaactcaaaaactctgctgagttccctagttctgctaaaatctatttccaggaagaattgtattttcatcgtgcaactgattttcttcctgttttctaataacgagaaccctgtatctgattcttcttacattttttttgccaagttaccaggaagttcagatccaaatagagcaaattgttcaaccttaagtcttcctcctctctttccttgatctttatcttctattttactaagtctatatggcctctgtgataaatcacctcaatcctttcgggaaaaggttgggtgaaatcatcaatcaaacacacacacttaaaggggcttgcctgctaaaattttagagtggggatccaatctcaagtattctgatttcaaattttgcgcatttttcagaatgccgaagttctcactatgctggtattgtgactacagtaggcacaggacctcaggggtttgcctgcagcaggtgtcacctggctggtatgttcaggagcctgctacgtgagcaggggtttcctggggtgggctytcactgcatgctctctgcttgttttagtccgttggagggaacatcatcactgccagccccatctccgacctcaaccccgtgttcatggccagtggggccaagctgacacttgtgtccagaggtgagctgcctgaagcagaggtccaggaagaaggacttgggggagaaaagtcycaccagataggtcattttctggagaaacagagctcaaagttcagtgacccagctttccctgtgatttggatccagggaagcatggagaatgtacctggtttggtggacgggaaagctggatattttctctgtagagaattcacagcaggaactgctacctgcatgccttacctagtggggtactggggctgggatgcactggctcaccacagcctgctgttggatcttcaggaattctgtgaaccatttgtgaaacacagttattaataaaaatcaggccaagtgcggtagtgcggtggcttatgcctgtaatcccagcactttgagaggctgaggcaggaggattacttgaggtcaggagttcaagaccagcctggccaacatggtgaaaccccatgtctactaaaaacactaaaattagctgggtgtggtggtgtgtgcctttagtcccagttccttgagaggctgagtcaagagaatcacttgaacctgggaagcggaggttgcagtgagccgagatctcaccactgcactccagcctgggtgacagagtgagaccctgtctcaaaaaataaaaataaaaataaaattgtataaaattacaatgaaataaattatattcaaaacaaaaggaataaatactcaaaattcatcacttcgtaagtacttcattttgctgttatcagtgctcctggagttatttgcatctgttctgtctgtacggtggaaatgctctacaattatgtgctccagtgcatctctgccttgtcagagggtccccaagaccaccccggctctgatattcactgagaggattcagcatgccgtcatattcctgsctatgacttattatagcaggaggatgcaaaatcagcaaagggaaaagatacatgggagcaaagtctggaggaaccaggtccaatcttccagagacttctcccagtggagccacacagtgcatgcttaattcctccagcaataagttgtgacaacacaagtgatgccttgcctaccaggaaagcttgttagaggctcagcgacagaggttttcttgggagctcatcacataggcagcctctactagcatgtgcctaaagtctggactcccagaaggaaagcaggggttcagcataaactattgattgtacagataatttaggcgcagtgagctgctccatcatggagcactgggaacccttctgaagtacaagttcccaagggccagccttgtaagcaacccctacagaggacagcagtccgggttgctgtgctaactctttcctgccttcttcccagcttcacattcagtgaygcaactttggtggcctggaagtatttacaccacagaaattggcaaatgctataaaccagggcttttccccctacacggaactggttgttaaagattcaccagcacaccattgcttaaggatgcttaaggatttcagagagaggatttggccccaattgtgccagtcatttgctctgactgtgggcattggagaccagcatgaagaatcccactgatggttatcctttctccccatggggggttcccagcctttccctcactttggctcctcttcatcttgcttctgtacaggyaccaggagaactgtccagatggaccacaccttcttccctggctacagaawgaccctgctgagcccggaggagatactgctctccatagagatcccctacagcagggaggtgagatgttggaagtggttccaggctctgctcaaataagtcctattgccaggctctagacaaagagatcagaatctgcttcagggaccaacctgagcatctctcaacctttacattgatgatttttctctctgaactttgcctctgttgaaccaaccatactcctttctggacaatgagaagttgcaggataggagtccacatggcatggactgtggaaccagatagctagaaacttggtcctgagtgagccatttcacctttctgagccccaattcccttatctgtaaaatgggcaccatgtcacttactatacgggttattgtgaggactgaaaataaacaattcataaggttcctggtgatgcctagaagccagtggagatgaccagcagctaagaacagaattccaagaacacatctagctgtcgaggattcctgcccatgtcagaggaaatttgctttcccgtggtaaagaatgtggggttcatgtgctgcatgaagaagctgcctgtggctcagaccctcatacgctgaccttaggcttgacgaggtgttgcttcactgacctcgctgtggattggtgcggatggattcctgcttcatgagtggctcttctggcctgttggggcaggtctgggcaccactggctgccttcctctttgttccctgggccctgtgatgtcttgacctggtgtgggtctttcctcccttagcagctaccagctcagaacacatccaaaagggcctgtcagaaaaggcatctgggagaggcttggggagccactgtcagagagagtgtgaaggtttcccacagctggagctttagtgagtgttctaaggcatgttttgcccttggtaattttgacctccttaatgagaatgctaattaaattagagcatttatatccctgaggtggtttcttaatggttttctagcttgtctgtatagaccattttgagcagtgattcccagagttttgaatttcacagttcagtaaactttttttttttaattatgagtgatgaaagtggggaggaaacaggtgtagctctattcagtttttatttgccaggtatggtcattaacaaaacacatccttccatgaaagaaaggagattttaatacccagaattagaaactctcaagaaagggtattgtcagcctgacactgacagttcactgtaccccagcgagaatgtccccgtggatgggcacagtcctgggagtgagcacctgggacctctgttccagaacaaaggtcaaactctgggctcagtgccccagagccacacatgacatgcaagctgagctagctttatcatcaggagcgggctccatggcttcttcagggaaaagtgggtggccatttgggggcctcaactgtgggcctcattgtgctttttccaatagatctcctctccctaaacctgctaattttggtgttcatcagaatttgtggtgccagagtgagtacagacctcaaaaggaacctgacacagaaagggcctgaagtcaggtggctctttcctggaaaatagctcatgctctcctcctatccttaaagaaagatcctggctcgaacccaggaaggaaaatgtgtttaaagcacaagggcagtgattgtttcatagtgtgatagtgatattttctttcttgcttgctttcttgctttgcttgcttgcttsccttccttccttccttccttccttccttccttccttccttccttccttccttccttccttccttcctttctttctttctttctttctttctttctttctttctttctttctttctttcttcctttctttctctttcttctctttttttttgagacagattctcactctgcctgctggcccaggctggagtgtggtggcatgatcacggctcagtgtggcctcaatgtcccaggctcaagtgatcctctcacttcaccctcccaagtagccgagaccacaggtgtgcaccaccacacctggctaatttttttttttttttgtagagatagggcctcactatgttgcctaggctggtcttgaacatttggttttaagtactcctcccacctaggcctctgggattacagacgtgagccactgtgcccgggttctttcaccaagatttctgaacgatgccaacagactggtgggagaggcaggttagagagggcactgtggaggccacaaacagaggatgccaaaggccaaacagcctcagtccccagagaggctgggtgggcactgatagtgggcaccagggtagggaaggtaagggggatgaggggtctctaaggagcctttgtgaaagcacccttcttcccctgcagctgttgttcaatggagaccacccagttctactttgtccctgaccctcagcttttctgactagcagggagaaatcctgttttttttttcagcttctgggaatgttatctggaacctctcctaaacaggtggtaatcagttacatttgatctttgattcccggggccagttcacccactgatgtgtgatggtgttatcccctcacctcacctcatagccctgtggtttgggtctgccatttgcagcccctrcagagcaaggtggaaaacaggcaccttcctgatctcttttagggggagtatttctcagcattcaagcaggcctcccggagagaagatgacattgccaaggtaaccagtggcatgagagttttattcaarccaggaaccacagaggtacaggagctggccctttgctatggtggaatggccaacagaaccatctcagccctcaagaccactcagaggcagctttccaagtaagagctaacagcacaatgaaactgctgctaatgttgctgctactaatagtatcattgttactgctgctgctactatgactaccagtagtattactattgctgctactactaccataactactgctactgctgctactactgctaccacttctacttctactataaccacagttgctactactactattaccgatactactactagtattactactaggagtattgccactgctatgctattaccattgctgctactactattgttactattattgcaactataattaatattatgattgctactactccagctgcttctactaaaattactactgttactcattattgcyattactatgactactgttgctactactatcactgcagctatgatcactgctgcaattcctactgtcactattatgattagtattattgctgttattactattactattgctaatactactgctgcctcttctaccgcttactctattagtactactactactattactgctgttatactagtattttactaataacattactgcttctaatattattgctactgaaattactactactactactgttactgctactactactactattactattgctactagtattgctgctgctactattactactaacagtagtattactgctgttattgatgctgctggtgctatgactgctactttttggcattgcttctgttactactattattactactgttgctgttgattctatgacaactgcttctatgactattactacttctactactactatctatcttgttaccactactgcaactattattgctgttgctagtattattactagtagtattgatgctgatgctactactactgctctgttattgctactattgctaccactatggctgtgattagtactactgctactactattactatttctatggttattatataacagaaattgtaccgaacacttcactarcattatcctaggaaatccttacagcacccacataggatcaataaagcttaacttggagtttggttccttggttccgaaattcctggctttgtcrtttaccaaatagataacataagtcaagttacttaatctccgtgtgcctcagttttctcattggtaaatgggtgtaggaattttgcttactacattttcaaatttaaattaaaagtgagaattcatataaaacacttaagatgttgcctggcacattgtgaggacttgatagattttaactgttattattttggtggtcttttaaaattgtatctatttttgaagatgaggaaacaggctcaatgagattaattaaagttgcctaaagtcacccaactctaagtatccaagccaaattttgaaccaagctttgtacagctccgaggccctgggcacacrgctctacacaaaggggtctggagggctgggcgggagcgctgtcccacgccctgctctctggcaggctctggaaggaggagctgctgcaggacgtgtgtgcaggactggcagaggagctgcatctgcctcccgatgcccctggtggsatggtggacttccggtgcaccctcaccctcagcttcttcttcaagttctacctgacagtccttcagaagctgggccaagagaacctggaagaygtgagtggggcctggccaggcacaggctctctgtagcatgtttggggatataagaagttggtctgggtagtaaatttgctcctctcctctggacatctgagggcagaatagcagggaccagggycacagcacaagaatcttggaaatgggagtgaccagctggcttagaggcagagtgctgggctgggctttggcgacagaggttcttgccctgtaatctcagctacgtgggaagctgaggcaggagaatcrcttgaactcgggaggtggaggttgcagtgagccaagatcatgccattgcactcyagcctgggctacaagagcgaaactctgtctcaaaaaaaaaaaaaaaaaaagaaagaaagaaagaaagaaagaaagaaaggaaaaaaagaaagggaatgcagagtgtgatgagtatgtagggtggaatgggaatgtcaggtggggctgcaatagccaggaggccgtggaatccataggatatgtcttcaagagagagtgcaggctgaggtgggcccagctcctgagatttgttcaccaagaatttattttgcacctatcctatgccaggttgcatgaggtgctagggggcagctcagtgtcggggagaacatggacaataaaggccacacttgggagacaactgcagagatggagtgtggagggagcccaaagtggagaggatgtcactgatgcagggacagcagagataaatccttctttaagaaaagaactttaaaaatacaggattggataaagaaaacctaaaattactcttactctcaaatcccagagaaaaccactgccaagtattttggttatttcctctgattttttttcctgcatttatctgtccatctatctgtcatactgtttgtctgccccatctctctctctctctgtttctatctgtccttccatccatctatcaatatctgtcatcttcctatcttttgatgtggatatattattttctaaatagacttgggaccacactgcatatagcgctttaaatccccctttgcttccattgggattatattgtgaacattttccatatcattaaatgcttcccacagaattgaggagggcaaggaaggaggagaaggatattcccaacagagacagcagcaggcataaatgcaagaaggagggaaagagtttggggtgttggagaaagtacagaccattcagtctacagggtccactgkggggctagcagtgaagctgaggctgctcttaaattctgagctctcagagcccgtgtttggatgctgagrgatccagycagcactcaaaggcgtatgaagtgaagagacaaggggatcagttatcagtttggtcatttttatggacaagcaaggaaggaatcagtgattgaaatataatcctggtcacctctgttttcttgtctccacagaagtgtggtaaactggaccccactttcgccagtgcaactttactgtttcagaaagaccccccagccgatgtccagctcttccaagtgagtayggtcagtgtatggctaatatcaggggactttgcaggccacatgagttggctagtggctgaccatcggctaatgactaacttgaattgtatataggtccataaaactccttactcttgtgcgtaaatacccagtgaagaaaatgggaatcgtatagatgttaatgtcactatttctcccttgtttgcctaaatttctctctttgggattaaactcttagctgcccctcttccttacagattttttttttttacgtgatggataatgtacaaagccagacgtcttcttgagtatgctaaaacaaacaaacaaacaaacaaacaaacaaacaaaccatctatctgctccagctttttgagaggtgctacgtaaagggtcagcaaacttttcctgaaaacattttagattttgtgggccagatggtttctattgcaacttctcaactctgtcattgtagcacaaaagcagccacaggaaaaacaggaatgaatgagtgtgttgccttccaataaaactttatttacaaaaacaggcagtgggcttgtgttggcccccatgccacaatttactgccccctgcacactagagtgtagtcgtcccaggcatgaactctggaacctgactgcctgaatttgtrtccacactctgccatttcctaattgtgcaaccttgaacaacttacttattcccttgtgtgcctcttaagcaagttaattatacccacctgcaaatgtggataatcacatacctgtttcataagatggttttgaggattaaatgtgttaataaaagtaaattgcttagatggtccctgggatatggtgaaacactcaataaacattagccattgttatgattactttgtaaaacaaaaacagaactttattatgagatcaataatttaaaacattttagaaaatacagaaaagcataaagaagaaaataaaaatcaccaaaaattccacctccgagagcaaattattattatatttttgtttaattcttttcattatttcctatgtgtatatggacatgtatatactatatttatagcatatattatcttttcctacataattgaattattgtcaaacacaaacacaaatgttttgcgtcacgtttttatgcttgcatgaacaatccttctaattaaagttcttcaaaagtatgttttaatggttgcatactattgtgttatatggggctgcataatttatttacccaatccccaattagtggaaatgtaggttcttctttttcttgttgttcttttatataacaacactaggaccacccttgctatcacttatgcaccttcctgttccctttgccccacgcccctctgaattctttattcttaccccttggtgtcctttgccatgtagcatgaagctcaccagtgtcccctgggcccatagaggggcagtgtccttggcagctcaccctgattgatgaccctgtcattccaggaggtgcccaagggtcagtctgaggaggacatggtgggccggcccctgccccacctggcagcggacatgcaggcctctggtgaggccgtgtactgtgacgacattcctcgctacragaatgagctgtctctccggctggtcaccagcacccgggcccacgccaagatcaagtgagtgacaccgccaggaggagctggtggaatgctgtgagggggccactgggagtacccaggagacttctctcaccctgctaggccatggagatgcaaagataatgaggtgcctccaggacctcccaggctagagagaggggaagaccttataggcaggtcctattattatctctctgttccagatgaggaaactaaggcacaagcagggtatgttacttgccccaggccacacagttggtaagtggcagagttggaatttgaagccaagcaacgtgagcaactgtgttgtgctgcctcaggatgttcaagccagagagtgtgaacttcacttcctggtgggcgttagacacataccctgctgagcagatcagctaggaaaagcccttccttgggcccactgtgtggactaggaatcaggtttccttgtcattggtcttttctctgctgctgctcctagtttggagacgggatccctccaggaatggtgaaccaggcacagctgaaatctaacagataaataaacttgtccaggtccctgaaaacaaaaaaaaaagtgtttaagttccyatggttggcagctataggatacattctttcccttttgttccttgtcttgagcccatattgacaataccataacccacattgtctacgctcaaaccacctccatccaagcaatgtgtgaatggatggaagaggatgagggggttgacattgttgtaactgcaacagttggggccttcctgggctgcacacacttggaagtgggtttggcaggacagagcttaaccctcctaacttaacctcagttccaataatcccagtcacactgctttctggcttagtgactttggaaaaactacctaacttccttgagtctgagtttccccaaacataaaatgggaattaggataagtrctttsagggtttcttgtgaggattaagcatttggaagatggttagaacttcagggcagtttacatacctttccctgaaatgtgttgccctatttccccatgggggcatgtgccagtgtgatgagtacatagttgagactgttatccttgatcatatagtcgggcattctccctttgcggttcgtgttgcctaattatggtaggatgccctgtcatgctgggatagcacaatgaatgtggggagacaaatccagctttatgaagctgttcagggccattggatcagtggcacagccgggctccatgtgctgattttgggagggagttaggtgtgatgtgtgcatgagccagagcgctccagagtaagtgctgttcgttctgatatggcttgcttgtacttggagaccagacagagcatcacgtaacatccaaagaggcctggcctgccttcttcactttatttatttttaaatggagacaggatcttgctatgttgcccaggctggtcttaaactcctgggctcaagtgatcctcccaccttgacctgccaaggtgctgggattataggcatgagccactgtgcctggctggcttattcactttatatccccagcaacattcagcatagtggcctgaacatggtgaggatttaatcaacatttgcagaataggatataattgaattagaatctaatagaaaagaagcagagaatcgaggaattaggatggagccaagccaatcaaaataagaacagggttgtccaaccaggtgatgggtcccctgctccagcttgctgacctggcccctcacaccactcattcttgcaggtccatagatacatcagaagctaagaaggttccagggtttgtttgtttcatttccgctgatgatgttcctgggagtaacrtaactggaatttgtaatgatgagacagtctttgcgaaggataaggtaagtcttggatttttttatatgaagtaaattgaataagtattgaagttttaatttgtgtacattgctccaaactcctgatctggaaaggttatrcatttgcatggattatggccatcatccagttggcccatattcaggacaatccaaaaagatagaatatgttacttgtttatttaattgatggctgctgtttgtacatggcaggatgtctctatgccaaagtggcagtaaaacaacactggtgattgcatttgaactaacaattcggttcttaagggacaacagtaagctctttaattaaaataaaataagaatacatttartacactaactagaaatcacaataccaccactacgtgaattggtaattcacttacatgaaagtttatctattgatttcaactatgtggaattcttcaacaacaaacaaaatttttcaaatgtttaagacagctgctacaaaagtccttatattttactcataggatagttctcgacagtcattttgtaattccaatagacatccaatgttgcaaattagacatgagtgggtacttctgaagagtgaattcatcttattattgatgtaaaagtgaaggagataacaaaaaactaaaaatatgagaacaaagactccatgaggagagcatttcatagaagaacaaattgctttacatactttaagagcttctcagagcagtgctagcattatggctagtgaaagtcagccagatttaaccaccattgcaataaccaacagccagatttaaccaccattgcactaaccaactgagtcaatagcttatttgggccanaagagataattatcagagacatgcatactaattgttggttcctattgtcagaaacttcatcttctaaagtgatgtgttgkacaaaaattttttgttgtttactttttcggggatgttggatgacaattatctctgaaggagatccattaagcttttatgaaactgaattattaaacaaaataaaacaacaatcattatcatataaatttttaaaaatatttttatgggtcatcaagtctaagaaccagtatttgagagctactgcttttgggtattagttgaagtataagacatgatacttaaagtatcatgtcttgtaagtacgtgtcttacaggccttatattgatgcttacagcctttacagcctttgagaagcttttggtataaatctgggaaatagaacataaaagagagtggtgaggtgaaaagaaaataaaactgggggtcagggcctaaggttagtcatgatctgtcaatagtaactagccaaatgtggccttgccttctgagtctccataggaagaccaatggtgttggagtgaatccgaattgacaaatgcacttcctggtgccatatccccctttctgctcatggcaaacaaggaatcaattgccacattctatctggttcagcttctcaatagtctgccagtactaaatactcagaattggcccttgagatgaaatgtgtttgccatcttgatcctagtgatcctcaatcagtaggataaggaaattaagaggccctagggcattcctaaagtgtgctttgattgtgagggcagggacttcttttggctttttgaacaatccaaaaataatttgtttcaccatgagcctggttgcgttctttaacagtctgtctctgctactaggttacttgtgttgggcatatcattggtgctgtggttgctgacaccccggaacacacacagagagctgcccaaggggtgaaaatcacctatgaagaactaccagccattatcacaattgaggtaactgagaatgggctgcctgtgtagaggagtgagctccccgtccctggatgtgcatgtattaggatcccctggaggggatttgagcagcaggtagggatttgactagatgggtttttaaatccctttcaaccctgggatttggggtcccatgaaaccttcccctttatgatcttatgcccagtccactaacaacagccaaactgagttcctccttctcaaaattttacctccatctggtccttgtggtattctttgcttttcctcaaggtccagggttgtccacctacagctgaggaaatggaggaatatgattctctgggctatagtagagcttacttcaagtctgtatgtgaagcatatagagattcatttatggaaagagagagtcaacaattcagagagcttctctttccctaatcagaacctatctttccctccctgctaaaagccacatttctgaaacttctttgtgatcctcaggatgctrtaaagaacaactccttttatggacctgagctgaagatcgagaaaggggacctaaagaaggggttttccraagcagataatgttgtgtcaggtagagctgttccatgccgcagtgggaatggggtggccctgstttgcaaattaaattcaagagatatrcattgaaccctgaagcagggaagtgatttctggacatttcctgacagaagattccctcttacgtttgtagcaaaataggagacagttggatgggaaagagcttcagttatcttaatctctactctcctgtctstaggctggacctaatgattctagagagattctagagtattctgatccggaagaccaactagggatgataacagccacataygcctgacagccttaggtctgccaggcctctaaccgcataaattctcatcctccccctacctgaaggcagtccttacccatcttcaactagcatcctccctcctcttccctttgccctgctctccctccacctctgtctctgacactgtgaaatcaaatccattgctcccaccccaggacaacacagctgactacctcttttggaactgttttttayattggctgttgtgctttgcaaagtcactatgaagccaactctccaacaagcctggtatgaagccgactctccaccaggcctggtagcttaggttcgggaacatgcgctggttttcagtgtttyaatcacatctattaatccctgctttactttttccaaaattttacaatgayggtttttgaaatccttgatttccataagctgcagtgagaagagaactttggactggatgcatttcagtgtcgttctttctttgttgtgggggtggggatgaggctggagcactcagctcccagatagctaagactttgggatccttttccaccccaagtgggaaaccttgaggttacccctcaggtagccattgcttcctgcccagaccacttggcagagtatactctctccttaggcaagctggccccttctgcagcattgggctcactgtgagggatctcactgcttccccaggggagatatacatyggtggccaagagcacttctacctggagactcactgcaccattgctgttccaaaaggcgaggcaggggagatggagctctttgtgtctacacagaacaccatgaagacccaggtagatgccttttgggtcagctcaaggggctgtcagggtagcggggagctcctagcagaccaggagggccatgtgggaaatrggaagagggagatgtgggctggtccagagggtactcgagtgtcatagtcctggagccagactctttcaccaacaagctggtatcactgaccttgttccataacctttctcagcctcagttttctcatttataaaatggggcctgggtgggttgtcataattattagatgagttttaatatttagactagagtttggtacatgttggcagttatcatttcagtgcctatggcctcggtcangtcatatcctgcctcagtttcctcatatgtaaaatgaaggtgttggattaagtcatagccacagggaccactaaattatctacagcagctcaaatattctttgtttctctactgcctgtaatgtgacagcggttgccagtgttttcggcagctggtcctactctcatgatctaccagtcgctggtcacctggtcagacagaataagtttctaraagtattctgtgaccaactgcttgccctctggttaaaaaccaatgctgaattcagtctggcaggccccagcatcactaaccacaaagctgcatgggattttcaatcaaggaatttcagaattcgcagcagtaattaggtccatgcatgttggacaggctctgccttaggcctgaaataagttcaggtaatgcattcagtgcgaatgttctgtctttcactcacagagctttgttgcaaaaatgttgggggttccagcaaaccggattgtggttcgagtgaagagaatgggaggaggctttggaggcaaggagacccggagcactgtggtgtccacggcagtggccctggctgcatataagtgagttccaaagcctgtttctcccatctggctctgggaagaagaataaggctgtctgtgccaggaaggttttcaggacttccccctgttagaattagtttccccctgctttgaattctcacagccctctgtttttagaacccttgggcatagtgggagggtaacatcgcctgttccrttgtggtctggcacaggtatccacctctgatctctcctactggctgtgagctctctaaatgaaagcacatacctcgcttccttataytctccaccttgtctakcacagtgcctagatggcaaagcagccctgtacaggtctgctcagcgtgcaggtggaaaagatggcttcccggctgtttttattctgagacttgcagggctgagctgctgttgaaggctcacaggcttctaacactgtcggtaacccccaggaccggccgccctgtgcgatgcatgctggaccgtgatgaggacatgctgataactggtggcagacatcccttcctggccagatacaaggttctagatgttggggctgtgctggggcgggatgwgccattttgtgaggaaagctgggaccgaatgtccaggcatcctgagctgcactcctactttttgcctatytgtagaagttcaaataagatatagcaagaagagaaattcaaataggctaacagcaacacagaaaggtagtgctgagggaggctggcaccccatctcccaagggtggcattcgtgacttctgtggatttgctgtgttctgagtctggtcaggctcagaaacatgattcaccagcatactcagggtaaaccatcgcgcttggtagcccaacattaacatgatcacaggcctgatgtaaaaattggaatgacagcttagtaatttactgtgagaaataaaacttcccaggggcctggacaggcccaagatgttaggatgggtatgtacttttccagaccatggttggacacggtccacacttctctctgggacagtccctcttctgggtttctgtggatgaccaatgcaccctttccctgtacacatcagcaaagccttatggggctccgcctagctctagaaacctgagagccctctctccatgaattggccttgaacatggcctttgacctattctgagtttgtttcatgatttaactcccagcaagggattatatttctcttagccccaaattcttgtgggcctgaagaggattccttgatcttctggggtcccagtttccgtgtgtgtaaaacagcctgtaaagggtattttaacagtgtacataaggtcaaggatttgcgtgctcctgtgaaatgaaactttttktgtcttctgaccaaaatctgtgaggagacagtccggtatctttcctagtttctcttccctgcgcttcccccccgccctatcgtgaccagccttctctttccaacctccttactcccctccgagaccagaagccaggtgccggtagcaggaggaagaggtgtggggacaagggcttccaggggtggggagccaagtgtgtgccactggggagaggtcagttcctctcttcttcacttsttaccttctggtgacttctgaaggtcacctttttttcaygggatgatgtggtgttctgtttatttcctccaggtgacataagtgggagggaggatcagagggagacagagaggtgggggaaacgggacttaygataaatccctctcctttctccttttatcaggttggcttcatgaagactgggacagttgtggctcttgaggtggaccacttcagcaatgtggggaacacccaggatctctctcagagtgtgagtaggacctgcagccgcccctgcacccagagctgacttcgaggtcagcctgttcccacgcaggcacaggcctccccagtccctgcttgctactgttgcagtagtctcctaatgggtccccaccttcaggtttcccatcctcgattaatctctatagcacaatgatgatcgtattatttctctggttaaaaacccatccttcctgttcaagataatttgccaagctagcaagttagttacaatgttttatgtatagtgtggtggcattgtgtgtgtgtacatatgcatggaatagtaatatatatatacagtaacatataaactaatactaatatatattactatatatagcatgcgtggaaaagtgtctgaaggaacatataccaaactgttagcagtgatgatcaaattgttaacaacgattggaatggtattgagaggcgtacacactgtcattttctgtgttacacatttctgtgatgttttaattttaaataattcgaattgctttttaaaaaatggtttcattgaagtataatttacataccataaagttaatccatttgaagtatataatttaatggttgttagtaaatttcaagagttgttagaccactgtcacaatccagtgtttgaactcccatcaccccagaatgatgtcttgcatcatttgtagtcattcccattaccattccataggcccaggtcatcattaatctactttccgtcttgtagtcaagtcattttatagaaccatacactatgtagttttttctgtttggtgtctttctctcagaataatgttttgtaggttcatctatgtttttattattattctttcttttgagatagagtctcactctgtcgccaggctggagtgcagtggcacgatcttggctcactgcaacctctgcctccagcttcaagcgattctcctgtctcagcctcccgagtagctgggattacaggcatgcacccctatgcctggctaatttttgtatttttagtagagacagggtttcaccatgttgatgaggctggtctcgaactcctgacttcaagtaatcagccctcctcagcctcccaaagtgctgggattacaggcgtgaaccactgcatccggcccatctatattatagcatgtatcactacgtcactcctgttcattgatgaataatattcyatcatagggatataccatatgttgtttcccattcaccacttgatggacatttgtgttgtttccagttttttgcttttatgcataatactgctctgaacactctcatactagccttatgtagacatgtattttgatttctcttgactaaattcctaggaatagaattgctgaatctgtggtgagcttaasattttaagaaatgatcgcattttcatgggcggaggcggcccggcaggcactgggagagctgggctttattattactaatattctacaattgtttaaataaaaggaactttataatgaaacagtttggaatactggctcaagaacctatgtcaagatgagctgaattttagtaaattactttaggaattatgacgagctaattgaattaggcttgtgacaatgaggaatttacatgacaggtaaaactcatattaaaaatgtttagatatttgcttctatagatgtcactttaataaaataccaatttagttttacttgtggcttatctagttagtaagaactttaataggctttactgggacaagcttactgctcttgtaggagctcctctcacaagtagttgtaatgccatagagtgacactcaggatcagtagcttgagatgttatggtttttctcttcatctatgacttgcagagagcctcccctttttggatccagacatcttttctgaatcctggttccactagtacatctgctcccctgtgatcccaaatcatagtcaatggtgcctcgaacatagcaccttcagttaaaggctgcctagtgctctgaggaaagcttgctgattatcttcctgctctactcaccccaaaaggcagaaaagcaacatagtcagtcctgtgctcatttgtaattgtaaagatcagttatatatatatatatatttgtaatgagagcaagtatatactcattataggataaatttaaggagwttaaaatatcccaaagtagaatttctatatctagycttttgtttctttcatgaatatttgcaagcaattaccattaaattcacacatgaaagattaatctgaaagatcagagagaccgtattattcctgaccatgatagaactgcttctgtggtctgggacaagtaacaaagcatctgcttgagttttgtttgtaaaatacactattaatatttgacctacctcaaaacatattgaggatctgtgaaatgctaagtgtccaaaataaaatattgctgattgtctttttattgaaagtaaatttcctcattaagccaacctgccttctgtaagtcatagtgcttraatctcaggatttttcattaggagagacctgtcattaaggatttgtaggtataattgcttagcctycattattggtgcttgggatagagaggttttagatttttctgttttttgttctgcttcaaagctcagtttattgaagacatttataagctattggatcatcacttgaatcaagattttgactagtgagcttaattgtccatttyttatgatttcaaagttacagtctgagaaatggctgattttaataactgtcctttcataaattaatgttggaataaactgaagctggagataaatacttcatgaaaactggctaaagtctgaaataattacctgttttatgtccaatagctactaaatttgatagaacagttttgagaaacatttcattcttgaaggcaacatctgacatggttctcagcaagttggaatagtaaagattgctgggctgttacgatgagtggaaggagcgtgtttgtagcatacaarttattcagcaatcttgtgctgttgacctaaaaatatgtcttaattcttcatcaaggcaagcctggtgaagyctttacttgttactacttcaacagttggaattagttgctctttttacttgatgaaacaaaactatacctctgaatatttatggatactttttactaaatcaggcttgtgttcttaatccaaattagtaaagttttatggaagctgaaatgtaacacagtagtctccccttatctgcaagagatacattccaagactcccagtggatgcctgaaacmtcagatagtactgaactccttgttatacagtcatctccccttatctgcaggagatacattccaagaaccctagtggacacctgaaacctcagatagtactgaaccccttgttatacagtcatcttcccttatctgcaggaggagatacattccaagaaccctagtgggtgcctgaaacctcagatagtactgaaccctttatagactatgttttttcaatctgacaaccaaggcgggactaagcggctaaggggcaggtagtacacagtgtggataagcaggacaaagggaagattcacatcccgcacaggacagagcaggagatcatcagatttcatcactcaggacagcttgtgatttattttatttattttttgttttgagatggagtctcactctgtcacccaggctggagtgcagtggtgcagtcttggctcactgcaacctccgcctcctgggttcaagtgattctcctgcctcagcctcccaartagctgggattacaagtgccctgccccaccacgcccagctaatttttgcatttttagtagagacggggtttcaccaggttggccaggctggtctcgaacttctgacctcgggtgatccacccgcctcatcctcccaaagtgctgggattataggcatgagccaccttgcccggccgacttgtgatttaaaacataaattgtttatttctggaattttccacataatatgtttggaccaaggcttccttggttaacaaactacggaaagtgaaattgcagataaagggggttactgctcctgtgctctaaaactggtgtttgggtgatcaggagcaggtagccaatgggaagagcacatctgagtgataactaaaggagtttctctggtggccttttcacattctccaatgctcaagcatattttccacttaccattttctctttcacctcattttgcctcaccatcccccatccctgcttatttcttaagcccattgatggcactcattaaattgtgtttagggctaatgaatcattgttccttaatatccttttcaatatgccacaatttaggacacatttaaaattttctaaaacaatatcctaatccgaatattgattaatttgagccacattcccaactctaactcagggcacactgccagtcttccccaatatctcctctcaattccccaccacaccttataaaattggaatcaaagaaatctcactctgtcattgtgaatctaagaataaaaacactgattttaatactgctttactagtttcagccttctaagtaggtaggcctctaggtattctgcagatcactggtggtcttgatagccattaatatatgtttgtattatgttattttttaactaaatcacagttggaaaaaaacatctttgatattatgcccttggacctgttactgcatcactggcgcttgtgatgcaataggacacttcgcctgtactaaaagggccaagagtaaatgccttgtttttttttttttggtttttgttttgttttgttaaacatgtctatagagttggcagttaatgctgaatttgtcaaacagcccttccaaaactattcttgtatttaaaaaataaatggatctacctaatttctattgattttttttaaaaaagaaatgatcaaattatattcctgagtgactacaccattttatattccaatcaacaatctttagggattccacatcctcagtaacacttggtattgtctgtctttacccactagaattagtgggtgtgaagtgatagctcattgtgatttcagtttgtgtttcttatatcctgtgaccttgcagaactcatttatgagttctaggatttcttctgtagattccttgggattttctctgcagacaatcattatcatctgcaaatagggatggtttttttcttcctttccaatctgcatgttttcatctccttttctttacatactgagatggctagccagaccttgcagaactataggtcatatatccttcctttgtttttattcttaaggggaagrcatccagtctttcaccattaaatatgttattggtagggttttgtttgtttgtttgttttttgtagatactcatgatcagattaagaaagttttcttccattagtgttttctgagcatctttataatgaatgggtgttgaattttgtcaaatgctttttctgcactgactgatatgatcatgtgattttttcttctttagcttgttaatattgtggattgtattcattgatttttttaaacactgaaccaaccactgtccttggaatgaatccagcttggtcatggtataattaatatattgccaaattttatttgctaaaatttgttaaggatttttggatccatattcatgagaaatattgctctgtagttttttcttttaaaattataccatcttggtcagggtttggtgtcaggataacactagcttcataaaatgagttagaattcctcttctaattctagaacagattgtgtagaattggtgttaattcttctttaaatgtttggtagaattttccagtgaaatcgtttggacctggagacttcttttctgatagccttaaaactattgattaaattgcactgtggtctgatagacagtttgttataatttctgttcttttacatttgctgaggagtgctttacttccaactatgtggtcaattttggaataagtgtgatgtggtgctgagaagaatgtacattccgttgatttggggtgaagagttctgtagatgtctattacgtcagcttgatgcagagctgagttcaattcctggatatccttgttaactttctgtctcgttgatctgtcctagagcttaaaagtataatacttgaaaaaaaaagaaacaaacaaaaaaacactattgattaaatttccttaatagttctaggactattcaaaktatctatctcatactgaagtggtagttttgtattttgagacattcatttaaaaatgttttgtttttcattattattggtacatagtagttgtatatatttataggatacatatgatgttttgatacaggcatacagtgtatcaggataaacaaatcagggtaacgtcaatatctatcacctcaagaatttatcatttttctgtgttagggaacatttcaattctactcttatttatttttaaatataygataaattatcatatatttaaaaatattatagtcaccatattgttctactgtatgctagatrttactcattctaactatatttttatatgtattaaccatccccattttatcctctgtccccctaccctccccagcctctggtaaacatcattctactctttatctccatgaattcaatttaattttgtctaagttattaaaaaattcatgtgtgtagaatcgttcatagtgtgttcttatttctcttttgatgtcttcagggtctgtagtgatagcccgtgtttcaatcctgatwtggtaatttgtggcttcactttgtttttctgtcttgccagaggtttgtcaattttattgctctttttaaagacccgggtttttgtttcattgattttctctattgtgtttgttttcaatttcactgatttctgctcttatccttattatttcgttcactctgtttgctttggatttattttgcttctctttttctaggttcttgagttgaaagcttaaattaactatctgagaatgttttcctcttttttaatgtattcaatttagtgctgtaaagtttcccctcagcactactttagacaggtcccataagttttggtatgttgtatttcatttttttcttgtatttttggtctgcttgtttatttccctgacaccttctctttgatccctaattatttagaagcatgctgtttggttttcaggtgtttatagatattccagttatctttgtatcctgaggctttctattgatttctagtttcattccgttttagttgaagaacacagtctataggatttcaattctttgaagtatgttgaggttcatatcatggcccaggacatggtctgttttgatacaagttccacgggcacctaagcagaatgtgtattttgctgttgatggctgtgtattagttttctgtggctgttataacaaatcaccacaaattgggtggcttaaaataacgaacatttattttctcacagttctgaggccagaagtctgaaatcaaggtgttggcaggaccgcacatcctctggaagctctagggaaggatccattcctgaccttttgtagtttctggtggctggtggcactccttgacttgtggttgcatcagtccaatctctgtctttgtcttcccatcaccttctcctgtgtgtccattcttgtctacctagacatacttctstcttacagagacatgtgattgcatttaggatccactccaatggttcaggataagctacttctctccagatccttaactttatcacatattttgccatataaggtagtatttacaggttccatgattagaaagtgaatatatctttggggaggcatttctttttcctaccacatgtataatgtgctataaatatccactagatcctgatggtggtgttgagttcttctatacccttcctgattttctgtctattttttgctaccaattttgagagaggagcattgaaatctccaactgtaattgtggagttttctatttctccttttagttctaccagtctttacttcatatctttttcagctctkttatttggggcagacacaattagtattgctgtcttttgggaggattgacacttttatcattatgtaatctccttctctctgtctctggtaattgtatttgctctgaagtctactttatctcatattaataaagccactcttgctttcttttgattaatgtttgcatgttatatctttttccatccttttactttcaacttgcctacattattatatttgaagtgattttcttgaagacagtatgtaattgggtcatgtttgtaaatccattctgctaatctcttttaactgtatttatasaatttatacatcatataatgattgatgtgttgaggcataagactgccactttattttttgttttctgtttgttctatcagcttttcatttctctgtattcttttgtgtgccttgctgtgggtgggttacttggacattttttttartattccatttttattaaaagtatctcttacatagctttcttagtcattgttcaaggtattatgttatatatacacaacttatcacagcctactgaagttctcattttactagttttggtgaagtatagaaaacttacctccctttatgactctgccctttcccatttatattatttttattttaaatattttctttacattcatttagaaccacatcaagacagtgttttaatttttgtttcaactatcagacaattttaaaaactgagaagaaaagcttactgcttgtacccatgattttgcttatagtgtttttccttccttctaattttccaagcttccttcttttatcattttctttctgtttagaacttcctttagtcattattttattgtgggtctgctggggacacattttcttagttttccatctgagaatgtcttgatttttttccttgttcctgaaggatcactttactgggcattaagttttgagttaacagttcgtttctttcagcacctgaaaaactgccacttcgttctggtctctatggcttctgatgagaaatcctctgtcattctaattaggctccccctataggtaagttgtcatattctctgggtgctttcaagatttttcctktgtctttagttttcagaagtttaattatgataggacttaccatagatttcttcaggcttatcctgttttaagatcaccaagcatcttgaatctgtaggtttacatatcttgaaaccttgggaacttttcagttattattgctttgagtactttcatgctcttctctttttctccttttcttccagatctccaatggcatgagtgttaggtcttttgttatagtcccaaatgtccttgaaactgtaatttttttttcattccatattctcaatatagttcagactggataatatatcttattctattcttcagttcactgattctcttctatgtcccttctcttctgctgttgaatccacccaataagctatttattttggttgttgccttttcaattctgaaaggcccattaggttcttctttgtatcttctatgtctttgstgagactatctgtttatttccagaagctttttatttctgtcaagtgtgttcacaattgatctcagaggcatttttttcatggctgcattaaaactacagtcagataattttaacatctttgtcacctcagtgatggcatctcttggttatcttttattattcaggaagtttgagatcttcctatcacttggtatgacaagtgatttttcactgaaacttggagaaacccgtcattaatgtacagatgatggtggtgatgacgatgttctgagagcttggatctatttaagccttctattttaattggctccttctgaccttgctctagcagtggtggatgccacctcatcactgctaggtagaggtagaaatcttgatcttccacttggcctttgttgatacccaggttaggaacaactccttcttacttctgggcagagatgggagatctacattccacgtgttgtccatggacatcatggtgtgggtggcctctttaccactggcttgtgctaaaagccttgactcttcactagactttttctgacacaaccagaaaggaagggaagagtggtgtgtctttgttatgtgggtggggaagtcaatgtgttctccagtgactccatcataaggtgtaggtacagccttatgactggccatcagcaatgaaagtcttgactcccgatctggtctcctctggcaccatcccagcaggaatgttggggtatctcataacagcctcatgaatgtggaagtctgggctcctactgagcttttgcaggtgtgagtaggaatgagactacgttttctttttctgtgatgtttggctggggtacttattgtctaaaagtgtttagttttgctagactgcccttttcttggtcttttggctagagataaaaggatttggaatatatagtgagctttttggtctctgtcrtcattggcatttctggattgccagctcctgccccaagtctgggatatatagatgaggcaaaaaggaaacccctggaactcaccatcatgtcattccttgggttgcaaagtccctactgggactgcctttttttttcctccacttttcagagtattcttacattgttgttgtggttgattttaaataaatatatagaattccagagtttttagtggtacttaatggaagtatggaagtgaaagtctctgtatatacttcaatgttgagtttctcacaagatagaatcctgagtaatgtgtcagtaattatcgtgtgcttttatatttagtctcagttgatgctcctccagtcacattgtaaatgaccagggtaagaccagaagtgggagctacgtactcctcattattgtggtcacagctttggsagatgaacttggaatattgagttgtttagaaaaataactagagggcttggatgaaataaagtcaattgtgagaattaacaaatttattttggtggtaccactttttacagttttttaaatyttaattttgtaaccatagtagttacgtatgtrtagattyttgtttgaaaaaaaaaaaaaaaraggtggctgggtgcggtggctcatgcttataatcccagtactttgggaggccgagatagacagatcacttgaggtcaggagttcaagaccagcctggccaacatggcaaaagcctgtctctttgaaaaaaaaaaaaaaaggttaaagttttcaggaaaagccgacattcccctttacccttttggatcacactcctctctgctaggggctgcctaattgrctcagttaggaaacttcacacttcagatctagggttaaaattgttcaaaaaaagaattattcttatttcttgttctcttcaagtataagacatgctttctggtatgggaaaaaatcacgttgaaaaacatacagtctttgtccctagacatcctacaagattttcaattcaatccagcaaatatattaagtgcctagggtggctacataaggaaggctatgacattgtttctgccctcaagaaattcacaatatggcaggggaagtagatgataaaagaaacagaaatacaagttgataaagtactagggaaagcaaaagtagaattaattgagacatagaaaaatcatttaggakgagtaagactgaaattatcaaagacacataaagcaacttgtgggagagagagagtacccatagggaaataaaccaaaaccaaaataaaacaaacaacaaaaaaagaaagctgccattgatctttccagagagatgagatattacaacttaaagaaggaacagaatgttactaaaatggagcagtcaaagaataaaaatgagctctcatgacttgacactatgaaagcagaggggttcaaagaaacttgacaaatctcccaaaaatggaaaacaatgtgaaaaaatagagaaaatacaaaaaaattttgaggatcagttcaagaggtccaaatcrtagacatttcagaaagaaagaatggaaaaaacagagaaggggaagctatyaataattcaaaaaattttccaaaactgatgggcatacactttgggattaaaacagcccatataataaccagcacaatgaaagaaaatagacctatgccaggttataatgttatgaaatttagaaacctgaggacaaagagaagatttcacaattttcaggaagaaaaaacagaactctccaagaattggaaaggcattgattggacttctcaatagcaggaagctagaatgtactagtaaaatgccttcacattgctgagaaaaactggaaagcctacttccaaattaggattctatatacagctgaatcattaattaaaggtgaaagtagaataaagacatttcagacatgcaaggtgtcaaagatgttcctctttgtgtaccctttcttatgaagatattaaaggatgtactccaacaaaatgagggagtaaaatttaaaaagggaaaggcatggaatctaggaacaggggattcaatatggagagaggtgaagggaatccctgggatgaatccctttacccctttggatcccactgggggatttaagatttaaatccttaggtaacagctgaatagcagatctagtgggcagcsaatttaaattggagtaggccagatggctctaggatagaaaatctgatgtgcttgaacatgttggaagcagagctcaggagggaaaagagaaaatatattaggagcagatttttagaattrgggaaaactttaagttggcttartaataagtacatacaaaatgaagcagatgaaaaaataaagacaattattaactccagggtgaaaaaaatattatcaagagagaagaaattgtaatgtaactacatggttcagctgtaagtaatgtttacagagttataatattaaattgactgttgatctgatcaaaatacaactatactgggaaataggaagctggtaggggtgagggctggagggagggggctaagccaaaactaaattctccttttccataaaagaaagacaacctaaaagtctaaaactgaaaaagtcaagacatagcaatgtagccacattatctagagacgtataagtttatctaaatagctgatagatgataagctatgagaattgtaagtagttgcttctggagactagaaggaaggaaagtggaagaggctactgtttttcataccatgacttacagaagtatgggacacttcaaactatttgcagtacaactttcatggctgtttcatagttttcattaactaatttacaatgaatttttaaaagttaactgttttcaaaaagaggcaagtgattagttccaactagaggctctggaatgaatttctccacagagttgctgaatgaggggactagtgggtggataaggtgcagtaaagatgctgccgcaggctgggctcatgcctgtaatcccagcactttgggaggccaaggcgggcggatcacgaggtcaggagatcgagaccttccaggccaacatggtgaaaccccatctctactaaaaatacaaaaattagctgggcgtgtggtgcgtgcctgtaatcccagctactcaggaggctgaggcaggagaatygcttgaaccagggagtaggagtttgcagtgagccaagatcgctccactgcactccagcctggtgacagagcgagactccatctcaaaaaaaaaaaaaaaaaaaaaaaaaagatgctgctgcaatatcctgggggagaaataacttgggtgcagaggggaaaggcaggcaatggatacagccctcaaagttcctactttgaggaaccaatgcaatcagtacactgttctctcccatttttgtttcctctgcttcagattatggaacgagctttattccacatggacaactgctataaaatccccaacatccggggcactgggcggctgtgcaaaaccaaccttccctccaamamggccttccggggctttggggggccccaggggatgctcattgccgagtgctggatgagtgaagttgcagtgacctgtgggatgcctgcagaggaggtaagctgagaatttggtagcacaagtcagagtgctttagactacttcgggggacagcggctttgtatcttgggcatctcccatgggggcagatgacaggcaggggctgctgagggggttggaagcttaactttaggttgtgccctgcccccacagtctcttgccrccaacaaggcctctgtgtctctctccttgggaaggtgcggagaaaaaacctgtacaaagaaggggacctgacacacttcaaccagaagcttgagggtttcaccttgcccagatgctgggaagaatgcctagcaagctctcagtatcatgctcggaagagtgaggttgacaagttcaacaagtaagcactaggagtagaagtccagttgctcttctgggtttcatatcctacagcctttctgctgacccmatataggaagctaataattcaatggataacttatgagactgctgagtttgccaactcattcacagccatctctttaagatcttayaatgatcttcagcccggggcaggtgggctcacagcctgcaatcggtgtcatagcctgtcagttgtggttcatctttacgcgtttgtaaacctttgggcacaccgtatgataaagaacactggcctaggactaacacgtcacagttatgcacctgcctctgacactgatctataaatatgaatttgggagtccctgggcctcagtttcatcatstgaaaagtgggcataattgggctggctctgtcttcctcacagagttactcagataattaaatataaagcacagagaaggctttattattgtcagtgaggcacagtgcckcctggagatgatgacagcccaagattaccagggcactctgacccagtacgggttgcactcagggaagaagagtgttgacaagaccccctggtgtgggctgtgcrccagctgactgttctcatctttgtgggcaaccccaaggatgtyctgttttgatgtgaacatccaaagatattcatgtcctcaatatgrtagcgaaggttctrtaagaatattcctttttctctagggagaattgttggaaaaagagaggattgtgcataattcccaccaagtttggaataagcttyacagttccttttctgaatcaggtaattgctttatagaattgtgtccatctccgctggactgggaccccatttccctgttgtttacagtattgcaagggaaatttcgttgtcactggtaacagggcttactggaggaactctttgctctttaaatgaaagtcgaacttgcacagtcctatttgtccagtaggtcatgggcagtgagactcagagatctgggatcaacctctagttcttacctttccttaactatcggactggagagagctactctatttttcttgttctgtttcttcacttacagagtgaggacagatatttgacctatttccctttgagaacaagagaaacagagagaaacatatgaaaaccttctgcaaactactgaagtgctatataattaaatcatgagattcatactgccataatttttgtctgaggtttacatccaaaatgctgctggttctcttgttcctgggctccatacctttggtcccaaaccttaatgagttggattttactgaattttgtgtctggcatccttstctttccctaggcaggagccctacttcatgtgtacacagatggytctgtgctgctgacccacggggggactgagatgggccaaggccttcataccaaaatggtccaggtgagcagccctctctggcagtgttstgtccgttgttagaggaagtggtataagaaattgagcagtgggrcctatcagagcagaagcaggcccggggtctggccctrgccctgttgcttatgtccgtgtagcctcgggcaagtcttttcccccacttgaactcagtttcctcatctgtgcaaaggagttggccaggtgacctctgaggacattgctattaccaacattctcagtgtgtgaggcgggcatgctctgtgtgtaaaggtcgcgagtttcccacattccaagactcctcggagtggagtgaggacaatgagctggattagagtcagcacatctgcttggcgcatggagactggccagattggatcttttgaaaagtgagtgttagtgtaaaaaggcactgtttgtcagtttatgaattttttatccaaccgaactccaycaagtgctccttcaaattcagccagatgtaaggacatcccagacaatgagattagagyttacraaattgttttcttgcctgtaacagtgaatgtgaatcctgtcttggggagaaggcagccaagccccatgataaccccttccctagagggcaatgtcttctcttttcgcaggtggccagtagagctctgaaaatccccacctctaagatttatatcagcgagacaagcactaacactgtgcccaacacctctcccacggctgcctctgtcagcgctgacctcaatggacaggccstctatgtaaggagcccrtgggatcccgcagagcagagggccagcccagagctgtgggcctggagagtctccctgggtgggagctagaagggttccttgcaggctctttggctctggccaggcctctggctcccttatccaggaggatgctgtttctccaaacctcaagctaaaagagaggcccaagaatcataatcactgccctcaaagctgggaaggatgagtgcaggatggggagatgaggataccgagggaaagcagaggcttctggaattactscctggtgctggagctagcaataggacaatgggctgaagctgaaatytgattatagaggcaggttggccacactggctcctctgccatatgggggatataatcaaacaagcagtttgagggaagaagacacctctctggggatccctcaaacatttcgccctctgtcagcctaagaattgagtcaggaagtgctctccaagcagggactagtggtggccctattggccaggtcctgtcgattctaccctgggccttgatcattctggagtgggtggccaggctgtttgagtggcaccctgggtacagcattgcttggaggtagccttgctggggccctcgggttttgcctgggctacagaatgcagagractgatgtgtctggggtgtggggggtgtttactttaggcggcttgtcagaccatcttgaaaaggctggaaccctacaagaagaagaatcccagtggctcctgggaagactgggtaagtctgagctgatccaagtcacgtttgcaaaggagagggaaattgacagcagggcctccgttccgaatccgaacaagtaataggagacaatattttagtcagaacagcagagagaagttgaggtggtttgtgtgattttacaggatgaataaatgctcattctggctgggtccctttctctatagctttcatcattgagggaggtcatttgagggaagtttttgatccaggatcttgacagccttgtgggaatcaggsttttctttgcctgagcctgagaggatgggtgcctgctgaacatgcctcatcggattgtcttgactcagtgggtctgctcccacaccccgcttgtcccagatgagcctggttttcctcaaatctccatctcttgagtctgagtctactgagattccctctgtgacagcgtggggagaaaacatcacccaaggacttctatcattcctgtgatttggggaatgacagaacaagcacttatgataagaatgagcccaattctctgacttctagaccagtggcctgaatgtcagaaatctcagagggaaggggcaagggagtctcttgcaggcgggaggctgtggctcctccagcaagtggaaatattaatggcagctctgcatccttccccagtattggagtggtagaactgggcagaagagtaacacatcaaatgtgactgcacataaaccggctcactagaaatcttcctcaatagatttaaagaaaacatgccatttttctcagacccactcatcttactatgccttctatgacctctccataccacgtgtaccaatagcacatgaaagtagcctgattttggtagttgggttttagcatggatttatcaggcagtttaaatgtttttaacaacagtcccgacaacartgttctatcatctgacctgtggatctgagctttgtcttcaaccaccagccatgtagaccagtgtgcctgggaaacagataaccccaataaatgaaccacagtcaccaacacatacatacacatgcgcatgtgcacgcacacacaaacgcacacaagcatgcgtgcacacacacacatgcacacgcacattatgttaaatgactagtgcaggttttaggaccaagtctttccaagccttagtttcctcatctgtaaaatgaggctaataatagtataggttttctggggttgtgagtataagtaagataatgtatgcaaagtgctaaatagcgcgtgtgacacagtaaatcgtttggtggctgctratgaagaaggcataaattatatcaagtacaacttaaatctgagtctgtgctagtgtttggggataccaaaaaagcacattatatagtccaagggataggatggagggatagtttgatcaacaggaaagcatatgtaaaagcacaaggtgaacatgtgaagtaccacatgagcgctatagcgtgttgcttttataatggccagttagggagagttcaccaaggaggggagaatggagggcaagtttgagtagttgttgagggaagaaaaggattwgcacatatatagaagaggaaccacataaataaaggtgcagaggtgtgggagatggaagaattgagagagatttagctcttgagtgtggctggggtggccctcgtgtgctgcaaaatgccagagagactgtggtccttaacatcaggcatttgctctayaggcaataaggagccgtggaaagctctagagtagggtagtgacatgcacagtgtggtatgttaagatggccactctggctgggctggggagacaactcaagggaggaagaccagttaagaggtgactacagtgttccaggcttcagataatgaggacctggtgcaggtggtgccagtgacaaygtraggtaaggtatggaaatgggagtcactagtaaaatgagttgattggcttccagaggaggtgagctcctgaaagcttagtggcaggtcagggttcctgaaaacctcacttcncctgcctgatggccatctcctctcctcaggtcacagctgcctacatggacacagtgagcttgtctgccactgggttttataggtaagtatggtgttgtccttgcccagctcatagtgtgatgtcgtcctaacctcactggtccactccagcaccgaatcctgccaggctgtggtcaggagagagcagctccacttatctcttcaacagacttccgctaatttcagtctaaagatgctctaaaatatgtggaatggccwcactgtgtgccaaggggtaaaagcaccagctgtgtgtcagaagacccgacttctagttctggtctcagggtgcacmatttcaccagaggaagtcagtggtcctgctgaacctgttcccctgtttcctcatkggtgacgtattggggccagtacctaaccattcctccctcagtgttctcctgcagaaaccaggctgtgtagtgttatgagttaggcattgctgttagctatgcatccttctttgtactgtgtgtgggacttttttatagaatgagaggaggatttagagcacgtggtcttattacaaaatgcagaatacagtggaamcttattaatacagggagattttcaagagagcgtatgacttctgcaactttaaatttagtagcagcgtgaatagctagagaccctgcccatctgacttagcagctgtaaaaagatatgatcatatttactgtcagtcatcatattttagccgtctctgggaagtttagctaggaccttttctttcacagatatttggaatattttctttcaatatatttggaaaataattcaatgtttctttaaaatatcatgtctgaatgtatgaatatatagatgcataaatatatatatgtataaacatttctttgtatgaaacatttattttccgtatgtatatgaatatatatatgaacatatatatgttaggcatatatatgtttatacatataaggcataaacatatatacacacaaaaaacatttatatgccctatatatgaacatatatatggctaatatatatgtatagatattacactgaatatatatgccttatacatatatgtataagrcatatatctgtataaacatatgtacacacacaaaacatttctatgccatatatatgaacatacatatggctaatatatgtatagatattacactgaatatatatatgccttatataaggcatatatatatgccttatacatatatgtatgctttatatacatatatataagtatataaggcatatatatgtattatacatatatgtataaggcatatatgtataaacatatatacacaaaaaaacatttctatgccatatatgaacatatatgtggctcatatatatgtatagatattacattgaatatatatgtataaggcatatatatgtataaacatgcatatatatatatatatatatatatatatatatatatatatatggtgaagaaatgttttgccaatgctttytaggtttttaatatctgacctacacatacataaacacattttctcataaattcctattacatttctggagttcatgaaactaaggttttataaaggtcaaascagaggagcatggtgaaarcagaggtcaaaggaattggtggtggttttttctgggagaagccttttccctcagccccatattggttttgtttttgtgcagatctggtcatatcagctcatgttattcctgtgtagtgtatagaataacacagagtcagtgtactgtaaactctaggtgtgtgaatacacatgcacaaatgcatagatatacacatatatttatatgactcaggcaaaagtggaattgtataaggtactccagattgaaaattttaaaaatgtataagggagcatttgtttctattcgtatcatttccctcaaatcatttgttgaactttcaaagggaccagcaggtggggagtggccgcttaaagatgcacccaggttagcatgagatgctgatcttattaactttcaccttgagaaggtaagcaggagaacttgtgtgaacagtctaagagccaccacaggcagaaccttcagtcctgaagaccttggattctaattcagtacatcctttggagtgtgactttcatgtccttcgtgagcccagatggatctgttacctctctttctactgtgcagaggctagcatggtactaaacactgctaggctgtacagaatgagtacagaagggctactggcaaaatagaggaggrcccagagacaaaatgttctggaatatctgggtttcgttaacaggttcaaattgttcaaaccatggacttttttggagaacagctgaatgcaaaaacttgtggggtttaaagatgttgtgggtcaagctgtacgtgcatagggaagggggtgtgttcatgttaatacatgtgcagtaccttctctttcctctcccagaacacccaatctgggctacagctttgagactaactcagggaaccscttccactacttcagctatggggtggcttgctctgaagtagaaatcgactgcctaacaggagatcataaggtaagaagtttgcaaaactttagkacttagtgggaaagagaagagaaacaactgagttgtaatacctagagctgatagagacaagatttctggttggaaaaataatgccttccattaaggataggcaaacatcctataaagggccacagagtaagtgttttagacttcgtgggccatacagtctctgcctcagctactgaactctaccattgaagtgtgacagcagtcatagacagcttgtaaacagataagtgtgactctgttccaataaaatatgatttatagacactgaaatttgaatttgaattgaatctcatacaatttttacttgtcacaaaatattcttctttttatttttccagttatttaataatgtaattattagcctacaggccccacgaaaacaggggcaagttggatttagcccatggaacgtagtatattgactcttttgtacatgatctacccagactcagattcaaagccccaggtttctgggaccctatctgactactcacgtatgaatgtgtgttattcccagttactgagagatcattgctgctccccacttcctacccggctgctacaaactcagactccagcggggatggtggcagcagagatttggtgggaacatcaacacttctgcctgagcacacccagggctttctgcttgggaacgtactctttggttggcacttgtagtctgagggtcactatgagtcatctgtcatattccaaacrtcttttcctcctctaacttcttgtaattttgctgtctactctagaacctccgcacagatattgtcatggatgttggctccagtctaaaccctgccattgatattggacaggtgaggctcagtgggaccagggtggtgacagacttggccaccgatgcaccccattcccctcctggggccacctgccacaacatgttgtccaaggttgtcttcaaacaggctgaaacatggaacctagggagtttcccccaaagtagaatttagattggtgatagtccaaccaaccctcaaggcagaaagcaaattaatatgggtcaacttgggaagggcactcacaactcaaaaacaagatgagaaatgaggaaacatggcatgcacatgtgaacatgcacacacacccaatttgagtgtgagcacaacrtagaatggggattgagtttgggatcaatgcccagacagtggggtctgaggtcagaagagttttctgtcttctcattcctcctccaccyaggacagcttttgtaccccaggaagcagatgctgccaaacatggagtggtggaaggccctgggagcaaaacacaaaggcttaagcagaagtagtaaagggaggtcccagagaaaatcgctttargagaatatgggattactatgaagaataggtgaaatagggctgggacctgtggctcacacctgtaatcccagcactctgggaggccgaggcaggcagatcacctgagatcaggagttcgagaccagcttggacaacatggcgaaactccrtctctattaaaaatacaaaaattagctgggtgtggtggcatgcacctgtaatcccagctactcaggaggctgaggtaggagaattgcttgaacctgggaggtggagtttgcagggagccaagatcscaccactgtactccagcctgggcgatagagcaagactcagtctcaaaaaaataaataaaataaaataaagaataggtgagataggaaaaaacagaggaggaatcaagaattcaagactgagcatctggtagaaaatacaaattgtacttctaaaaaatggacaactactgagtatacgaaaatctggccattagtcaatctgttcattaattcattgaacaaccatttatggtcccctactgtggccaggcaccaagccagtactgcagacccaaagatgattgccagtcggtttcttttctgaatgctcgttgaggtatggtagtgccccatgtcacgcttctgagcagggggctgagagagcagatgtgtgggcctgtctancatggcagttaccctaggagagacctgtaagctgaactgcagtgggggcactttctcccagaggacaggcaggggtgggcgttcaaaaaggctggaggtaagtctcaaagaatctactatcgaataaatcctcctgtgagcttgcttcttagctttggctcaccatttccccagtagcaacatggaaggaacatctccatctgcactgcggcaggttgtagtgggaaacatgcccacctagaatcactgaccttccgtgttaatgtctttgctctgcctgagccaaagcctggcagaagtccggatgggttatcccagggctgaggcgggagccaggtaagcaatagagggcagttttagctacattccaggccgcgctgcagttggcgctttgtgtccattgtggcaagtggtatctgtcctcagggaagaaggtggcaggctaactgtgctctccatccatcctgcaggtggaaggggcatttgtccagggccttggcctcttcaccctagaggagctacactattcccccgaggggagcctgcacacccgtggccctagcacctacaagatcccggcatttggcagcatccccattgarttcagggtgtccctgctccgcgactgccccaacaagaaggccatctatgcatcgaaggtaccattgctctggctctgtgctgtctcttctgatctgccctgggggaggccccagcgggtgatgagaggcctcagtgacccacctggtgggacttcaaagggcatatcttgaggagggaagatggtttgacactgaccttggtaggggcagtgggatagttgggcagtcctgcttgagaaccagttaaattgggttgaggagagcaccttagtatggtctgaagcccacttctttgggtgaatttagagggattccttcatcaaatcttctcatttaaatcctggcccacacccatatctcaggcgtacgtcactggtgcttgatcytaagagatgattttacaggtacagcattagtatggtccaatgacaatcagcacattcactgccaatgggatagcacctttgtacacacccttttacctccttcagttgccaatactcgaccttaagacttgatcaggctgggtgcggtggctcatgcctgtaatcctagcactttgggaggcctaggtgggtggattgcctgagctcagaagttcgagaccagcctgggcaacatggcaaaaccccatctctactaaaaataaaaaaaattagctgggcatggtgggacaygcctgtaatcccagctactcaggaggcttaggcacgagaatcttttgaacctgggaggcagaggctgcagtgagccgtgactggaccattgcaccccagcctgggcgacagagcgagactctgtctcaaaaaaaaaaaaaaaaaaaaaaaaaagacttggtcagatgcctggaggattgtgtcttctatttcttccttatctgcagtaagtatgaaaaaatggttgaaaattgatttagctgatgcatataatcctagtttgaagaaggaaggcaactaatccttggtaaccaaagaaacatccatttgctcatctcgtggtttactttaccatagtgggtggggaagctgggacatattgtgacccttgccattgactgtcatactttaccatgcttgggaattactgaggcccatgataaaaatgtgcctttctggggcccacgcctagaaattttgctccaataggtgtggcttagggccctggaacatgcattttcagcaagtatctttagtgattctgatataggtggtctctgatctatactttgagggggagaaaaaccaacctatgctagaaaatgttttaattcctgtttgttcttatgcctataattcctgcggatgctgtaatatgactatggtgcctgtaaatgttggtgtcagagttgcaggtagactcttcccctyggctagtgactgaggaaaaggttaaaactcacgtcagattttgtggtctgtaaaatacaattaccgagtataactttaaatggtacattatatgtgcatgatgtcatcagagaaaattacatgagtgttcaaagaaatatgtccatgcggtccagtcatgtactagcttgattgttcttagcccctgatcatttctgactgtgccttcctgctgtatttggtgtggctcccatcagtgctttcctggtgccaccagccctcctcgtgcagagtttgctgcctggcctcctaggtccacttgatgatgtggaggcaggaccacctgcctgagcccctgccctgtgccctgtctgtgttcaggctgttggagagccgcccctcttcctggctgcttctatcttctttgccatcaaagatgccatccgtgcagctcgagctcagcacacaggtaataacgtgaaggaactcttccggctagacagccctgccaccccggagaagatccgcaatgcctgcgtggacaagttcaccaccctggtatgatgcccctcaagcatccactcagtccaggggaggccagggataggctggcaaactgcagggaaggttctgcacagaggagaggtgttgggctctctcctaaccgggcagccttgcatcaatggccacccttcattgtgcatggtatgaagcacacactcgaacttgcaagagaataatgagaaacctccttaaagctatagcttgtagctgggcctccttagagatgggaggaatgtgtggtgcacagtcataactcacagattttattattttccatctagataaggatgatggatgaaactccagagagcctaatctttagtatgagtcagtcgctagcatttttttttttaatttatgttaaggacactgtatgaatattggggggatggagggaaaaagaggaaataattaattagatcaaccacatttgtcctgtgatgatcatgtgccattctgatactggggacacatagatgtccttgaggactttgcaaccttgggaaaccagatgattccattatagggtgattgattactgccttggagrtgtatgtggcagaaagtagtagaagaattccgtagtcattggaatcactttaagaagcacctatgtgatacttgtagttggcaatgcctaacaaaagaagactttgctaggacggttgcttccgctttggggatctcagaaccagcccagcctctgagtggtgctgaagtgggctctgtacagtggctttaattgcctttgcaactgcaacctgtgtggagttagcaggactgggttcttcctgatactcaggtggggcttyctctttttaaaattcgatatgctttttggatttataggtaaagtgggtacatgtggtcccaagtggggagggcacagaggaaccccaggggcagacaaatccaccatccgcagacctcaacacagtgggtgaaggaggcatatgggtccccattcaggtcttccttgggtctaccaagagctttagctatggagtgagaactacacagaccgtgtggcactcccaggcagtaaagatgcccacatctgtgcagcaacctacccacagcccagaaccttcccactatggctcccaatgctgacaatcacccaaacccatttccctgagaggagtgggtggcatggctcccaataagctgccacagtttgcaaggcgagctctttgccaacagtctgatgcagaactcagtcnnnnnnnnnnnnnnnnnnnnctttttttttttttttttttttttttgagacggagtctcgctctgtcgcccaggctggagtgcagtggcgggatctcggctcactgcaagctccgcctcccgggttcacgccattctcctgcctcagcctcccaagtagctgggactacaggcgcccgccactacgcccggctaattttttgtatttttagtagagacggggtttcaccgttttagccgggatggtctcgatctcctgacctcgtgatccgcccgcctcggcctcccgaagtgctgggattacaggcgtgagccaccgcgcccggccggggcttcctctttttaaaattcgatatgctttttggatttataggtaaagtgggtacatgtggtcccaagtggggagggcacagaggaaccccaggggcagacaaatccaccatccgcagacctcaacacagtgggtgaaggaggcatatgggtccccattcaggtcttccttgggtctaccaagagctttagctatggagtgagaactacacagaccgtgtggcactcccaggcagtaaagatgcccacatctgtgcagcaacctacccacagcccagaaccttcccactatggctcccaatgctgacaatcacccaaacccatttccctgagaggagtgggtggcatggctcccaataagctgccacagtttgcaaggcgagctctttgccaacagtctgatgcagaactcagtcattttcgtaagctctctgtggccccagacctgaaacaaagatccgtttctatgttacaacataccagcgatttaaaaattcttgccatggatttgcatgagcagctgattctatgaactttttaaggactgtgagtttcaaaagggatcacatctgtattgtttgtcaccatatctccaaaacstaatagaacgcctgccatgtggaaagtgctcagtgaaaataaatgaatggcttaggaaattaaggagtcctgccctgaggcattctcaacagctaggcctgcagagtggtgcttggccttggaatgatggttggcagtggtgggaggtgaggtatgcaagagagtgggaggagcatgatcagcagaccctggcaatgagaacactatcattccttcctagtrtgtcactggtgtcccagaaaactgcaaaccctggtctgtgagggtctaaagagagagtcctcagcagagtcttcttgtgctgcctttggscttccatggagcaggaggaacataccacagaacatggatctattaaagtcacagaatgacagacctgtgatttgtcaagatgggatttggaagacaagtgaatgcaatggaagattttgatcaaaaatgtaatttgtaaacacaatgataakcaaattcaaaactgttatgcctaaatggtgaatatgcaattaggatcattttctgtctgttttaatcatgtatctggaatagggtcgggaagggtttgtgctattccccacttactggacagcctgtataacctcaagttctgatggtgtctgtcctttgaagaggattcccacaaacctctagaagcttaaaccgaagttactttaaatcgtgtgccttcctgtgaaagcctggccttcaaaccaatgaacagcaaagcataaccttgaatctatactcaaattttgcaatgaggcagtggggtaaggttaaatcctctaaccrtctttgaatcattggaaagaataaagaatgaaacaaattcaaggttaattggatctgattttgtgaagctgcataaagcaagattactctataatacaaaaatccaaccaactcaattattgagcacgtacaatgttctagatttctttcccttcctctttgaagagaatatttgtattccaaatactctttgagtatttacaaaaaagattatgtttaatctttacatttgaagccaaagtaatttccacctagaaatgatgctatcagtcctggcatggtggctcacccctataatcccagcactttgggaggctaaggcaggagaattgcttgagcccagcagtttgagaccagcctgggcaacatagagagctcctgtctttaaaaaaaatttttttaattagttggtcttgatagtgcatgcctgtagtcccaactacttgaaaggctgaggtggagagatcatttgagctcaggaggttgaggctgcagtgagctatgattgcgccactgcactcctgcctgagcgactgagcaagatcttgtctctgaagaaaaaaaaagaaataaaaatgctgctatcaaaatcaagcccaaccagaggtagaagagccaagaagcctgggttctcatcctagctctgtctcttctgtctctatctttgtgatcttggactgtcaattccccttcctgtgatccattttactgcaaacataagggttgcagtaaagggttgtctcacgtcttctgctttaaaagcctataaatatatgacctgaaaactccagttacataaaggatctgcagctatctaaggcttggttttcttactgtcatatgatacctgggtctaatgaactctgctgagatcacctcaagtttctgcggttggtaaagagaacaagggaagaacaaacatcccttttattgctccaaatggtgatttaatccctacatggtgctgggtggacaatgtgtcactgtcacatgccttnactgtataaatccaaccttctgccagagagaatctgtggttctggccatggagggaggatagtggaaatgatatagttggactggtgcttgatgtcactaataaatgaaactgtcagctggttggcgtgtgaaaaatgcttattaattatcatcacaccaaatgctagtatcttcagtatcttggccagccttcatttcttgaaaacacacacacacacactttcttacaaaaatccctctccagagtatcctagatatgctggctgttgtacagcatggtcaaggtagaagagctttaaaaactaaacgagtgtttacactgagatccaggtccatttcagatgattttctgggatgttctgggacagggcctgagacctgtcacttgtttttagtgaagctcttggggtgaagcagtgacacagaattcccttgtgtgcttaggtaccaaggtgagagtagagtggtcatgaaaatccaacaagaaagtgctttgtgaactagaaatcactgtgctattcagaggcatcgtccgtctgagacaccttgccttgccctgttgtcttaaagtgcttccagtctatacagtgagatgtcttggtcttttttggtgttgcacaaggaatgcagtcaacactgcctgcggtatcgcctggaacctgcagagggcagtagaagattgaacaaggggcaatattgtccaggtggcccagcagcatcgcatttgttaaccattaggtactgatttaggtaggatctctgcatagaccagatgtcctcggaggcttccccaagagctgaattcaaagctgacttagggttttagaatgacaaaagtctcaaaggagctctccaaagacatgggtcagccgtgggagtctgagctccagatgaatggctagcaaggggaaggcaattcttattttcagagtatctgcaacttgccaggtgacaaggtgaatgctttacctacagggtctcatttaatcctcccagtggttttacgaggtaggtcctttaacccctataaccacatgaaggagaagccctacccctgaccatgctgagggcttactcagagacatttactcctaagtgcccaccacaaccagcgggcagctcccttacaggccaggaaacctggtgtgtattgggagtcacctgcctgtcagagtggacagttgctagccaggctcacggaggtggatggaggcaccaggatgcccaccgtttcatttataggcaggctgaggattctcttgctggcacggccagggtactgagttgtcatcagggcagctgatgagactccccttactccagagctaggtggctgggaggctgggacaggagggcaggacagaggttgtaggaggaactctgggcaagggataaggacagaaatagtcttagctgattgatttatgactgagaacatccccgaacccatggtatttttatcttttgcggagggggagcctggaaacctgtccatttgctgcctattttggatcgtgggacaagatgattcctgacatacagcttccttaaacatgaggtcaccctggtgccccccaggcccaggagcctgcccttttgttttgtttctatcctgaactgggggagtacgtgttcctaaggcaggagacagatcctgtgacaatcttgtcacctgaaacaaatcaacctattgatggaagtggaaatgtcaggcactgcccaaagggattctggcgtcatctctgtccttgaactgtcctgctctggcttgcacaaccccccaggccacctcagcatcccagaactggaaagaccatcaagttcaatctctctattttagagaggagaaacataagcccacagagagaaactgactcgctcagggtcctacggccctttagtagcacagtcagactgacagcaaggctgcctggttcctggtccaggctttttaaaacttaaccatacaccactagtcaactgagccttctattaggaaacctgtgggtcagggagctggggtatatgacagaaatctagttacactgaatgggaagaagacagagcaagcttgaggcccaagataaacactggtgaggagggtaatatgcctgtatgcctatatatgcctatctgcctgtgctcctgtcacaggatgctaaaatgggattctttccgcagccccacagatgggaaacaaaacaatgagtgcaaaaacatcccctcatttcaaagagagatgctgaatctaaatcatctgtgcaagacttgcggagagatggctggaaactaattttgccaccattaactcctcatctacctcaagagtttaaaagattgaagtacagaatttgagagattgggaagagaggtttcctttggaggtagcaaaccatgcattctccctgccaaacaggagagagtgtgtgtgtgcatgtgtgtgtgagaaaaggggggtctcgtggtaaatgagatctgcttgggaagctgtggttggattagactgaggcattaaggtagtgagaggaaggggatgagagccacagggcaaggataccagtgtggccacactggagggatccaccacccaggaggacttcctgaagggtgtcatggaaccccaacaaacaacgggaccatctgatgccccaggatcaaaatagcctcgggctggcttgttccagtgtggcccatgaggagtgcccacacatccttgccctggatcctttgttccagtttaaatttccccctctccccacacctttcagtagggaagaaggtgagcccaagagtgagacccttttctttgagccctgagtgttagtgggagggagcttaggaatggatacacaggctgcaaacattgcactgatgagcccgtgcatcagccctgggagcatagagtctgagtggcatgtcatttgctcccctcctcctatctttccgtctccatcacatcctggcagatttgatcccctgttcagccaattgcccttatctgtgggctgacaacaaagtcgttctggtccatgcatgtgctctctgttcttcctctcactagatggagtattcccaggggtcctcgtggtggctgacgttcttgtggggcactcactacctttccttgcttcccaccgaggctagactgagcacccgccccagggtggtgacacacagcatgcctctgcccactcttgggtgttaggagctgagcataaaagcacgtgtggagtgctcaagctcctctgcttctcctctgcttccctcttccctcttgggcaggttgcttagctcctctgacctcaatcttttcatctgtaaaataggtgtggataatcatatccacctcactgggctgttgtgaagattgaaagaatcagtggggttaaaagcactttttggagtacagagttgttgtcatttgcaggcctttgaccatgccttaaaaggggaagagcaccgggaaatcatgagtaagctttccaaaacttggatggaagggaagatgcaggaatgcatctcgaccataatgaggtgtagggtgatgggtacatggattagctgtgatcttaggccaggtaagagaagctcacctgctccttttggcacaaatgattgattagcatgtctcagcttctcacgtgaatgtgattttcccagcacgttgggctgggtaggagggccggctctcagctccctatagctgactaagtggcacaggtgagatggaatgaagagctcgtcagcctcacctggctatcttcacaagcctttatcagaagtgcagaagtcactctcttctgttattcttgctgtttagttttgtctgacaatgacaacaactggcatttgtatagcaatttgaaaggcactccccgttgcaatgctttctgtaactcttgtgataaacctatgaggtgtgtattacaatcatacccactttacaaacaaagaaactgaggctcggggagaagatgatggtgcagacaagagcactacctgtgaaatcaactgatgtgtttcagtctttgtctcccacttagctgctgtgtgatctcgggcaaattgctgaaatctttacatttctacttccttgtctgtgaatgagatcatggtggtactttcatggggttgtggagaggatggcatccaaaaatgcagggaaagcacaaaacctagtgcctggcaaggaagcttctactcttatacagcgagagtacacctgaggagtgttaactaataagaaaaccaacactgcacagccgcaaacaaaagagaagatgttttaactggggtcttgggaattgtaatgagcaagcagctaaattgtgtcccatccaggtgaggttgggtaggggcttataaaggtttactgtaagtttacctatctggaakgttctagcagagtctttaattgatgatggctggtcacagcttaggatgtgtctgatgatcaatccagtttggcatagctgtttctccaggaggttaatgatcaggtccaatagaaacagctgagatcaaatgcagctggttttacaatttggcccagtttaatagatcagattccatctgggtgtgtacgtgactggggtccaactcctcatgccttcctggcttttttgatacttctgacataaccatctccatttggattttctttctgacagcaatgactttaacctaagactccagatgccaaagcttgagctctttcaatggggtggtgctggctcttaattttttgcattacacacttcagttggcttctagccctggagagaacacacacacactcacacacccatcacaaccatctctctacctgttcactctcttccatccctccatcttggtctcagaatccaggggaaaggacatgcctggctcattgtcagtagaaaagcacctgccttaggaatcagactccctgcttctctttccaaacccagaacagtcacttcagagtgggaggcagctccagaaggcgagggggttgggaggcattgttgataatggcccaaaggtcatttcctccacaccccagggagtcctgattgttgcttaatgataagcctttcccagggtacagaatgtatggcagaatgtatggggtcttggaccctttctccatcctcctgagagccatcagtcttatcaagtgaaagtattctttgtcttcttggagtgggccaagggcttcctgccaggaccctgtgtactttataggcctttgtggattggtgacaatggtcccgtggtggttctgtagtagtgtggagctctgggctctcctatgcactactttaatctggaaacaccccccattctccatccccactgctgggggccaggagtgctgtgcctctgggagatgtggctgtagtaaagttgttggtaatttgtggccttcagctgatgaggagattggcttgcaaggcactcggtatgcatgttcctaagtcccaaaatcaggttttctccttcctcaactatatatgccatgtgttccttttaaaaggccagatgctgggctaagctaggggctcaagtgtaaagagcaagggctgccagcaaacgctctactcagctccagtattttcataagttctcttctcttgggaacattactcaccctctgagcctcagtttcctcatttgtaagtggaggagaataagacctgttgtcagtgtggtgaagttaaatgacatagtcaatgaaaggcacccagcacagcctgggcaacatagtgagacctcgtctctaaaaaaatttttaattagccgtgttcggtggtgtgcacctgtagtcctagctccttgggatgctgaggcgggaggatttcttgagcccaggtgtttgaggctgcagtgcacctcaaatcagaccactgcacttcagcctgggtaacagagagcgactgtctcaaaaggaagaaagaaaataaaagaaaacaaagacactcagcacagcatctgacacctgttgttaggtgcttaataaatgtcaataccttgctgttccaagattctccaagcctatgtacaacaattttgtaaatttagtgtccaaacatgtttatgctatacacttgtagtagacactattgcaaatcc

SEQ ID NO: 95110 - DNA, 14492 bp, Homo sapiens
agatcaacttcgtctgcattttttattctttctgtaggataaattccccgagaaggaattatttactggattaaaaatacagtatttttcaaaggctttgttgtatattgccaaatttatttccagaaaagttatctagtttatatttttattatattatattatatttatttatttatttattttttaatagagacaaagtctacctgtgttacccaggctggtctcaaactcctgggctcaagcagtcctctcacatcagcctcccaaagtgctgggacgacaggcgtgagccactgctcccagcctactttatattttcattagctggaaatggaggttcccagaaacatcaagatttgtgacattagctgggcttggtagcatgtgcctctagtcccagctactcaggaggctgaggtggttgtattgcttgagttcaggagtttgagttcagcctgggaaacatagcaagactctggctttaaaaaaaaatgaaggctgggtctggtggctcacacctgtaatcccagcagtttgggagaccaagtcaggcggatcacaaggtcagcagtttgagaccggcctggccaacatggcaaaaccctgtctctactaaaaaattataaaaattagccgggcatggtggcaggcgcctgtgatcccagctacttgggaggctgaggcaggagaatcccttgaacccggtaggcggaggttgcagtgagccgagatcacgtcattgcactcctgcctgggtgacaaaagtgaaactccatctcaaaacaaaaaaaaaagaaaaaagatttgtgaaattacttgaaatttgagtgggaaataatattaagtactttctatatgccaagcactgctaaatactttacatagaataacctatttaattctagccaggtaggtacccaggttctcacctggcttttttgagagttgagggaattaatttgtatgtagtttgaatatcccttatctgaaatgcttggggccagaagtgtttcacattttagattgtcttagatttcggagtgtttgcattatatgtatgggttgagcatcccaaacctgaaaatttaaaattcgaaacgctcctatgagcatttcctttgagtatcatgttggtgctcaaagttgtggatttttggttttcagatttgggatcctcagcctgtacctatggcccgttctcagcacactagttaggaagctctgcttaaaagtataaagaactgctgggcatggtggctcacacctgtaatcccagcactttgggaggccgaggcaggtggatcacctgaggtcaggagttcaagaccagcctgaccaacatggtgaaaccccgtctctactaaaaataaaaaattagccaggtgtggtggcacgtgcctgtaatcccagccacatgggaggctgaggcaggagaattgcttgaacgcgggagacagaggttgcagtgagccgagatggcaccactgcactccagcctgggcagaaagagcaaaactccatctcaaaagaaaaagtgtaaagaacctttaaaaccttaaattaatagtaacaatgacataaattccttcaggtcaactgtatattgtataatagttgaaactgcttttgaattagtggcataagggcataaaagaggaaacatttatagatttgaggagtagcatgttcttttgtaatgttattcagtcactgccaaatttattttttaaaattaaagaactcaaatatttcaggtagtggtttttttttcttctatatagataatttaagtattttcttcttaaagctgctagtacgagctggcttcaagagcatgttgcagatcttagtcgaaggtaagatgttatggagtttcatgatatgcataatttaaaggaatacacaagaaatgcatctatcatgggaacttaaattattcgttgctgaggttactacgtgaatcacacaggtcagattgttattctccctttactttttaattgatacaaaagagaactttataaatgaaagggctttgttcacaaatcctctttgctttctttaagaagtacactatgtggtaccaaaatacaagttatcttttacaaggttgtcaccagttttatgtgagttctgctaatggatactctttctgtttgttttttcttagcttgtgtggaattattccgggacttagcagtatcttccttccccgaatgaatccatttgttttgattgatcttgctggagcatttgctctttgtattacatatatgctcattgaaattaagtgagtattttttattgttgtcaagtatgttttgatttctggggacttacttttaagggcatcagcaggatggatagtggtcaagcttctagcagtttcgcttatgtcctgtgtaacttagatcacatcttttccttaggtgtcttcatctgaaaaattaaggggattgggttcaataagtatttcttaccacaatgtataatgcagactggaaaacaatttaaattccctactgctgacctgatgagtgaaacagaaaagagaacagtaagaaagagatctgagccaccactgctattgccgagagagggaggagaagaggacgtaggcgtgaaacaattttttaaaaataaagccttttaggaaataggctttacagctgctttaagcttaacatgttatggcatatgattctttggctacccaccttttaaatattagtctttactagaatttgtccttattgttcttgctgttttatgtattttccttaaaaatcacatgcaagtatttgtttttgtttgctacttctgtgggattcctagatttttatttctagcccacatctctattgaattccaaaaggcgtatcttcctgacttctataggtgtctactttaactgaacctattttcccttaactctgaaactgttttttcttctatctcccatctcagtgaatgggagatacaagaaaaatactgtcatttatgccaatgcattcttattttaaattgcattaaaatatacataatatagagttggcttttttctgagatggagtttcgctcttggtgcccaggctggagtgcaatggcatgatctcagctcactgcaacctccacctcccgagttcaagcaattctcctgcctcagcctcctgagtagctgggattagaggcacctgccaccacacctggctaatttttgtatttttaatagagatgaggttttgccatgttggccaggctggtcttgaactcctgaccttaggtgatccacctgcctcggtggctcatgactgtaatcccaacatagagttttttatttacattgagtgtacaatttggtgacattgcatgcagccattaccaccatccatctccagaacctttttcctcctgccttccttaaattccatgctcattaagcagctttccttttcctcctcctcacagcccctggaaaccaccattctagtttctgtctctaggaatttgacttctctaagtacttcacagaaatgaaatcatataatatttgttcttttgtgtctgcttatttcacttagcataatgtcctcaaggttcatctatgttgtaacatgtcagaatttccttcctttttaattggaatgctgaatcacattttccaatgcataatgggtaaacagtgcattttgtttacccatttatccatcagtggatatttgaattggttgcatttctttgactattgtgaataataccactgtgaacacgagtgtacaaatatctgagtccttcctttcagttcgtgtgggtatatacccagaagtgaaattactgggtcatgtgatatgataattctgtatttatctaatttatttaattttttatttttgtaggcacatagtaggtatatatatttatggggtacatgagatattttgatacaggcatacagtgcataataatcacatcagggtaaatggggtatccatcacctcaaggatgtattttttctttgtgttctaattatgctcttgtttattttaaaatgtacaataaattattgttgactgtagtaaccctgttttgctatcaaatagtagattttatttattctaactatatttttatatccattaaccatcccccacatccccccaatattttagttttttgaggaactccagtgcatcattaatacccacttttcctccctcctcctctctcaccactccccaagccatttctaattcgtctccaagccttgtgtaattgtttattaatatttatttatttggctgggtgcggtggcttacacctgtagtcccagcactttgggaagccgaggcggctgggtcgcctgaggtcaggagttcaagaccagcctggccaacatggcaaaaccccgtctctgctaaaaatacaaaaattagctgggcgtggtgatgcacacctgtaatcccaaccacctgggaggctgaagcaggagaatcgcttgaacccaggaagtggaggaggttatatatatatgagacatatatacacacacacacacacacaaatataaaatatgtgttgatatatatatataaacatatatatatgtttatttgtcccctctttcccattctcattgctgctgtccctattaagacctttatcatcatttctttggcctaattagaatagcctctggtcttctagttttcattcttatccattgctagttaccttttattttgtcactaatgtgatcattcaaaattgctagtttggagataatatattcctgtttcaaaaccctccccttgaggtgtacccaacagctcattgagaacgggccacgatgacaatggcggttttgtggaatagaaaagggggaaaggtggggaaaagattgagaaatcggatggttgctgtgtctgtgtagaaagaagtagacatgggagacttttcattttgttctgtactaagaaaaattcttctgccttgggatcctgttgatctatgaccttacccccaaccctgtgctctctgaaacatgtgctgtgtccactcagggttaaatggattaagggcggtgcaagatgtgctttgttaaacagatgcttgaaggcagcatgctcgttaagagtcatcaccactccctaatctcaagtacccagggacacaaacactctgcctaggaaaaccagagacctttgttcacttgtttgtctgttgaccttccctccactgttgtcctgtgaccctgccaagtccccctctgcgagaaacacccaagaatgatcaataaagaaaaaaataataataataataataataaaaccctcccctttgcatagttgcaaaaattgaagttgtcagcacagagtcctgtgtaatcaggcccctaccaaccttactaaccatccatctatctattcctgaccatttgtggttttattgctgggtcagggttttcatgcccctgcacatgctgctttcacttgcctatctttgaagtctctgcccaaatgtcaccttctggattatctccaccccaggagccttgtcactcaatcttttgtgcggccatggtactctgtagacatttctgccttagtgcccaaagtgcttcattatgtttttcacatgtgtatctcctgttatttctagggcaaggattgtgtctcattcacatttctatttctagcatgtggggaaaagtagaaaagagtgcacaatcagcttgtaattattggcattttggtctgtattgttggtagaacttcagccagtttgaattgttgatgttgactacagtgttaccataaaaaattcctggagaatcttacctggtgaaattcctggggaatttgaagtcttattagaaataattatcgctcactggaaacttgatataattactgatagattccattagtctttctgtatcaaaaattactagttgaatgacacacagccacggctgagtggctgccctgcccctgtttcctttcacgtttttgctgcatgtaggtggttgtggccactgtgcccggagggaggcagcagtggccagtaatgcctgggaaactcctctgggggtacattatggaactggaagcacccttggaggagtccgagagccagaagaaggagaggcagaagagctttatggatatcacagtttcggctaatggattatggacctgtacttcccttatatggtttttaygaagatttaaacaagataagctgaaaatacattacacagtgctggagtgacagaaggaagtcaagccaccattatgactcagatgagaaatcagaaacaagagaaaatggtgttacagattacctggatgctcccaagaccaaaaaaattaaaatgaaagagaagctaaatggagacactgaagaaggatttaatagactttcagatgaattctctaaatctcataagtcaagaagaaaagatctactgaatgagatattgatgaatatgaaaaaaaaaaagcaagtatcatccttagatagttctactcatgaatcaagtgataagaagctagaggagaccttaacacatgaacagaaagaaggaaccttctccaatcttcctatttctgaagagactataaagcttctgaaaggttgaggggtaacatctctctttcctgttcaagttaagacctttggtcctgtatatgaaggaaaagatttaatagctcaagcacagacgggaacaggaaagaaagacattctattttgcgatccctttgattgaaagactccaaagagatcaagaaacagttttttgtttgtttgtttgtttgtttgttttttgagacagaatctcgctctgtcgcccaggctggatctcggctcactgcaagctccgccgcccgggttcacaccattttcctgcctcagcctcccaagtagctgggactacaggcacccgccaccacccccgactatttttttttgtatttttagtagagacgggatttcaccgtgttagccaggatggtctcaatctcctgaccttgtgatctgcccatctcggcctcccaaagtgctgggattgcaggcgtgaaccactgtgcccagctctgattggatctttctaaactgtgccatgttgtgcttgatgaagtggatcaaatgttagagttaggttttgctgaacaagttgaagatattattcatgaattctacaaaactgattctgaagacagtcctcagactttacttttttctgcagctcgcccacagtgggtatgcaaagttgcaaaaaaatgagtgaaatccagatacgaacasattgatgtttttggaaaaatgactcaaaaggctgcagcttctgtggaacatttggccatccggtgtcattggtctcagaggccagcagttactggagatgtccttcaagtctacagtgggtctgaagggacggctattattttctgtgagacccagaggagtgtaactgaaatagccatgaatccacacataaaacagaatgcccagtgtttacatggggacattgcacagtcacaaagagaatttacactaaaagacttcagagaaggtagttttaaagttttggtggcaaccaacgtggctgcctgtggtttggacattcctgaagttgacctggtgattcatggttctcctcctcaggatgttgagtctatatccatcgttctggacgcacaggtagagctggacagacagggatttgtatatgtttttatcaaccaagagaaagaggtcaactaagatatgtggaacaaaaagtaggaattacttttaaatgtgtaggtattccttctacaatggatttagttaaatctaaaagcacggatgccataaggtctctggcttctgtttcttatgctgctgttgattttttccaaccatcagctcagatactgacagaagagaaaggggcagtggatgcattggctgcagctttagcccacatttctggtgcatcaggctttgaaccacgatctttgatcacctctgatagggatttgtgaccatgactctggaaagcctagaggaaatacaggatgtcagctgtgcttggaaagaacttaacagaaagctgagtagtaatgcagtgtctcagattaccagaatgtgcctcctgaaaggaaatgtgcgtgtttgctttgatgttcctacaactaagtcagaaaggttacaggcagagtggcatgattccgactggatattctcagtgccagccaaattacctgaaattgaagaatattatgatagaaacacatcttctaattccagacagaggagtggttggtcaagtggccagtcgggccgatcaggtggtcgatctggcagccggtcagttagacagagtccacaagggagtcgctcaggaagttgacaagatggtagaagatgaagagggaatagaaatcgatcaagaagtgggagccacaaacggagttttgactatttgatagttaatctaccagtatgaggttgcctatttctgcctaatcatgtatattatgcaccaaaaattaggtcatcatagttgaggtatgtgtctgctatttgcaaataaattggtcatatttttttaaaaagtatttcacaagaatggttgtaaacagatctacttaccagttatacctttgaattaaaaaacctctttttattgtctcttttcaaaaaaaaattactagttgaagttttttgtctgtctcaagcaaataaacatatttcagctctttctagttgacagatagtttgacaaaaaaatgcctgacggggaaatgtccacattttttttcatcatacctcttcctactaattaacataattattagttatttttccactaaactttgaaaggaaagaattctaaaaactggagtatttttctttgaaatgtttctttgcaagtagtggccaattgtgataaaattgtgtcctgttgctcagtcctgttgctttagataattaatgttcaggagatttaattgtaatatgcccagtgagatataaatttaaaatttagaattgttttttccttttagtaattattttgccgtagacactgcctctgctatagctattgccttgatgacatttggcactatgtatcccatgagtgtgtacagtgggaaagtcttactccaggtaaggtgcttcttccaatgcacgtgcttaatattagccatgttcttctaccagattaaaaagttgtatgtgttgttctacaagattgtgaaatttttatttttattttttaattttaattttttttttttttttttttagagacaggtccttgctctgtcacctagactggagtacagtggtgggatctcggctcactgccgccttgacctcccaggctcaaaggaccctcccacctcagtctcctgagtaacaaactacaggcacacaccaccacacccagctaatttttaaaaatatttgtagagatgggctctcactatgttgcccaggctgatctcaaactcctgggctcaaatgatcctcttgctgcggcctcccaaagtgttgggactatacgcgagagccatcgtgcccagtcataatttttaattacaaaagttttttggccaggagaggtggctcacgcttgtaatcccagcactttgggaggccaaggcgggcagatcacaatgtcagtagttcgagaccagcctggccaacatggtgaaaccctgtctctactaaaaaaatacaaaaattagctgggcgtggtggcgtgcacctgtaatcccagctactcgggagactgaggcaggagaattgcctgaacccgggaggcggaggttgcagtgagctgacattgtaccactgcatccagcctgggtgacagagcaagactccatctcaaaaaaacaaaacaacattttttttaatgccctccctttaacagtacagattgtgaaatttttagttactggaagcccctgctagaaatgaagtcaaacaataatctctgacattcatatagtcagaacctgatgaaagtccattagcaagtaaaatagtcacaaatcttcctatatttatattgtgacaaaatcacaaatttaaagctattattatttttcaagtgaaaagaatgttacttctttttttttttttttttttttttgagacagagtctctctctcttgaccaggctggagtgcagtggcgctacactcaggtcactgcaacctttgcttcctgggttcaagcgattctcctacctcagcatcccgagtagctgggactacagccatgtgccaccacacctggctaatttttgtatttttagtagagctggggtttcactacattgaccaggatggtctcaaattcctgacctcaggtgagccacccgccttgaacctcctaaagtgctgggattacaggcgtgagccactgcacccggcctgaaattttttttagatatttattttccctcagtaaatgtgctttggcttttgtgtaatctgcttatgaatattttattatttcctgccactgaatcagtgagactttaaaatttcaaacttaaaatcttaaatgacacattgctacttactgaaatgataggaacaccctgaatatgaatagaaaggcagtttccggccgggcgcggtggctcatgcctgtaatcccagcactttgggaggccgaggtggttagatgacgaggtcaggagatcaagaccatcctggctaacacggtgaaaccccatctctactaaaaatgcaaaaaattagccgggcatggtggcgagtgcctgtagtcccagctactyaggaggctgaggcaggggagtggcttgaacccgggaggcggagcttgcagtgagccaagattgcgccactgcattccagcctgggcgacagagcgagattccaaaaaaaaaaaggcagtttcccagggccggatgtgcgtgtaagcactgtggttccttctgtcttaccctatgccttttccaagacttagggcagtagttccatctccagaaaaaataaaaataagataatagttgcatagtgctatgccctatacaaaatacgacctttgtaaccatttcccaaagattttttgttggttggttggttgtttaagtgttatttatctttttatcttatcttcaagataaaaaaacaggtgtgggccagttgatgatgttgttccactagtggggccagttgaaacctctcttctctaaatcatgataggacagctgtcaaagcaaaggctggcttaaaatccttttggggagggggttcaggaccattgttggcaaacttttttccttcccccattattcatattttattgtatttttccccagacaacaccaccccatgttattggtcagttggacaaactcatcagagaggtaagatggaatagtaaataaaatcattttattttatatcagggaattgaaaaggtggatacttttaatactttattcaactctacctagaattttatttgagggaagttcatgttcttcacaataacatactaggagccataatatagtggcaaacgtggaaaaatatgaggaattgttcaatttggaaatcaaattcacttgaagtgaatgtggaaggtaatggcctaatgaccaccctattataaatgctatgatttttatttattttatttagttatttagttattttttttttgagacagtcttgctctgttgccaggctgtagtgcagtggcgcaatctcagctcactgcaacctccacctcccaggctcaagcaattctccttcctcggcctcctgagtaggtgagactacaggcgcgtgccaccatgcccagctaactttttcttttttttttgagacagagtcttgctctgtcgcccaggctggagtgcaatggtgccgtcttggctcactgcaacctccgtctcccaggttcaagtgattctcctgcctcagcctcctgagtagccgggactacagatgcatgccaccatacccagctaatttttgtatttttagtagagacagggtttcgctgtgttggccaggctggtcttgaactcctgaccttgtgatccacccgcctcggcctcccaaagtgctgggattacaggcatgtccacagcgcctggcccgcccaactaacttctgtattttttttttttttttttttttttctgagatggagtctcgctctgtcgcccaggctggagtgcagtggcacaatctcggctcactgcaacctccgcctcctgagttcaagtgattcttctgcctcagcctcccaagcagctgggattataggcgcccaccacatgcctggcttatttttgtatttttagtagagacagggtttcaccatctcgaccaggctggtcttgaactcctgacctcgtgatccacccacctcgacctcccaaagtgctggggttacaggcatgagccaccacgcccggcctaacttttgtatttttagtagagacggggtttcaccatgttggccaagatggtctcaatctcttgacctcgtgatccacccgcctcggcctcccaaagtgctgggattataggtgtgagccaccgtgcccagcctgttttttgttttttttgagactgagtcttgctctatcacccaggctggggtgcagtggcatgatcttggttcactgcaacctccgcctcctgagttcaagcgattctcctgcttcaacctcctgagtagctgggattacaggctcccaccaccatgcctggctaatttttgtatttttagtagagacgaggtttcaccatgttggccaggctggtctcgaactcctgacctcaaatgatccgccccttgtgacctcccaaaatgctgggattacaggcatgagccactgtgcccagccttttgttgtttttttaaaatatatatataaaaagagatggggtcttgctatgttgaccaggctggtcttgaactcctgctctcaagccatcctcccatcttggccttccaaagtgctgggattacaggcatgagccactgtgcccggtcaaatgctgtgattttttttttttttccagggggtacagggtcttactctgccacccagtctggagtgcagtgccgtgttctctgcttcccaccggctaattgtacttttttagtagagacagggtttcgccatgttggcctggctggactcgaactcctggcctcaagtgatctgcctacctcagcctcccaaagtactggaattgcagacatgagccaccatgcccagcctagactttcttttaagttgttacaaatttccacctactaactaatgaagaaataaaataatgaactattttgatgttgaaactattttaaacctttgattgtcagtgtgacagaggccacttttaccagtataactggctactactctcaactagtgaagcctggccttgagtatgtgtcctgtgcaactgtaccagtgggctacacactatatatctggccttggaatttcttctagactcacatccaaacaacatcctgtgttgtgcagagatttgttataagggatttcagagaaagaagtgattgagaaaacaaaaaaattaagtaaaaaatctgataccacaaagtgctagatataaatatattccatattgatatgaaaagaaccatacactgttgaagaaattggttggggtaggggtttaaaactgagcagtggggacctgattctaaaagaattggggcaagcaagaaacgaggaaagcaaggtcttgggtcagtatggaacaaacaggaatggtatcttgagtggtctgagacttctcttagctaatgagtgtccttgtgcaggatttggctgtcattcttaagtttaaactaagtccataatgtgactaaactgcattggatatgttaagtacagacaactctgatcacctctttctgtttttggtaggtatctaccttagatggagttttagaagtccgaaatgaacatttttggaccctaggttttggctcattggtatgttcttttacatatgactttagttataatttaaaatatagtcttccatttttaaaactgaaaaaaagtatttccttaaaatttttatagagcctttgattcctagttatgttaagcagagtctaaaatgtacatgaattcaattacctaattgagggattttttggtgtttagagacagggtctcactctgttgcccaggctggtgttgaactcctggcctcaagcagtcctcctgccttaatctcccaaacaatagaggaatgtttttattttttttccatcaaacatgttaatgataataatacaggagtgtccagataagacaaatttgtagtcagtgtaatttccaaataagaaaatgttaaaaaaaattaaaagtgcaattgctttcttttttaactgtagttctcattttggagagtttgctgaatattttgaagaactacagtaacacaact

SEQ ID NO: 95111 - DNA, 105980 bp, Homo sapiens
agtgattctcctgtctcaccctcccaagtagctgggaccacagacacgtaccacaaccacacccagctaatttttcgtatttttggtagaggtggggtttcaccatgttggccaggctggtcttgaactcctgacctcaagtgatccacctgtctcggcctcccaaagtgctgggattacaggcgttagccacagcatccagccttaagcatgttaattaagtttttataattcagcaaaatggttggaaaatgctgtcttaaatgagatgcttaagctgccgtctgaacatgaggtagaaggaaattctacacataatcattgtgctaaattacttgcaaagatggccacaacaattcctcctatcctcatatatatgcccctttgcaatgtgactttgctacttctctatcaagatgtggagcttattttcccatatattgcactagagttggccttctgacttgctttgacaatggaatgtagtacaaatgacactgtgcaactttggattttaggtttcgagagaacttacaccttccactcacactctcttggaaaccagatgcaatgtaaagaagtcagggctatcctgctagagacatatgtcccagctaatagccacaatcaacctctgaacatatgaatgaggctagctaggccatacagccattcggtcaagccatcagatgactacatccacaggaatgatccacaggcaaggccatcagaagaaccatccagctgaacttaccccaaattgctgagtcacaaagttgtgtgtaaataaatgtctgctatcttaagccagtgagttttggagtggtatattacatagcatcagaaatctaacacaatcattatgtttgaatcatttttcaaatttctcatatttattaaatgagtaccataagcaaggtgtcaggctggatgcaaaaagtgaggcaaaatgtataaagtgtgaccactgccttcagtaagtttacaatctatatcaagaggtgatgaagtgtttaaataatcatcctgcagggcaatatagtataagagccacagagtaacacaaccatattgtcataacaactgaaaaacaagatcatttctgctggaggtgataatggaataatttatcaagaatataacagagctggacgcggtggctcacacctgtaatcccagcactttgggaggccaaggaaggtggatcacaaggtcaggagttcgagaccatcctggctaacacgatgaacccgtctctactaaaaatacaagaaattagccgggcgtggtggcacgcgtctgtagtcgcagctactcaggaggctgaggcaggagaaccacttgaacatgggaagcagaggttgcattgagctgagatcgtgccatggcactccagcctgggtgacagagtgagactcagtctcaaaaaaaaaaaaaaaaaaaaaaatataacattagaggtaagtcttgaaggactttgacagtggaagtaggaggcgaggccattctaagtgaatgaaaaatgacaggagagtaattgtagtcctggaaaagagcaaagtaggtacagaccaacagtctatattagctagagtatagtgaaagtgcagaggaaatgtcggagaaccattctttattcaaaaactatcttcctcatggccaagcatagtggctcatgcctgtaatcccagcattttgggaggtcaaggtgagtggatcacttgagctcaggaattcaagaccatctggggcaacatagtgagacctcatctcaactaaaaaacaaaaaattcagacagatgcagtggctcacacctgtaatcccagaactttggtaggctgaggcgggcggatcacgaggtcaggagatcaagaccctcctggacaacatggagaaaccccatctctattaaaaatacaaaattagctgggcatggtggcacatccctgtaatcccagctactcgggaggctgaggcaggagaatcgcttgaaccagggagtcggaggttgcagtgagccgagatcgcaccactgcactccagtctggcgacagagcgagactccatcttaaaaaataaataaattttaaaaaaaactaccccagcatggtggtgcatgcctgtagtcccagttactcaggaggctgaggcaagagggtggtttgagccagggaggtcaaggctgcagtgagctctgatggcgccactgtactccagcttgggtgacagagtgagaccttgtctcaaaaacaaaaacaaaaacaaaaaaccaacaaatctccttgttagtatcatggtgagtaaaaaataaaataaaaatagaaataaactgaacatggtggctcatgcctgtaatcctagcactttggaaggctgaagtgggaggattgcttgagggctggagttcaaaactggcttgggcaacacggtgagagagaccttgtctctacaaaagaacttttaaaacaaaaaatagataatttaaaaaaattaaaaaaaacaaaaaataaaaaaataatcaagtatcaacttgattccaggcactgcttactactctagtgttatactgtagatgtggaagctgagtaactcatccaagatcaccgaaagtgatggaacacagatctaaatgcaaccagtctgactccaggaccatttaaccattctactattgggccctatcttggctaagttagaaagtaagttactttctttagtggtaaagactggagggataacagggaagatagttatttaagaaaaaaaactggcatcaaactaaatatccatcaatagttgaacagtaaaataggttgtggtaaattcatataatggaatactatatagcagtgaaaatgtaccacagttatagaaatcaacagggaggaatttcaacacttaattattaagtaggtagccaggcatagcggtttatgcctgtaatcccagcactttgggagaccaagacaggaggattacttgagcccaggggttcgagatcaacctgggcaacagtgagactccatctctattttcttaaaataaaataaatgaaattttaaaaattttgaggagggaaagcaaacaagggatacttgaaatatgattacatttccataaagtcaaagtgaggcaaaatcatacaagacattgtttagaaatacataaatacactgcaaactaaaaatgagacactagaatgattaatataaaattcaggatagtggcttcctctagaggaagagacaagacattgagattagggaggagctcacagagtgcttcgaggagttggttacattcatttttcttaaatggaatgctgcttattatttttctttaaattgtgcatttaagtaacacacttcttgtttatatgatatatgtataaatgtaatttttttttttgagatggagtttcgctcttgttgcccaggctggagtgcaatggcactatcttggctcactgcaacctccacttcctgggttcaagtgattctcctgcctcagcctcccgagtagctgggattacaggcatgcgccaccatgcccggctagttttgtatttttaatagagaaagggtttctccatgttggtcaggctggtctcgaactcccgacctcaggtgatccgcctgccttggcctcccaaagtgttgggattacaggtgtgagccaccgtgccaggccctgaatcagatttaaaagagggcatttcattaaaaaaatttttttgttgtttgcttttgagacagagtctcgctctgtcgcccaggctgcagtgcattggcatgatcttggctcaccgcggcctcagcctcccaggttcaagtgattctcctgcctcagcctcgcactagttgagattacaggaatgcaccaccaccacaggaatgcacctgtctaacttttgtatttttagtatagagggagttttgccatgttagccaggctgctcttgaactcctgacctccggtgatctgctcgcctcggctcccaaagttctgggattacaggcgtgagccaccacacccggccgaaagagggcatttcagaatgagggtctagcataagcacagagaagggggagcaataagagggaaacagggagtaggtcatttttgcaatagcctgtgacatttgtagggcagtactggcggggaataattaagtaaaattggctggtgctgtggctcatgcctgtaatcccagcactttgggaggccgaggcgggcaggttgcttgagcccaggaattcaagaccaacctgggaaacatagcaagaccctgtctcaacaaaaaagtaaaaaaattagctgggggcgcgatggggtggctcatgcctgtaatcccaacactttggaaggctgaggcaggcggattgcttgagcccaggagttggagaccagcctgggcaacatggtgaaaccctggctctataaagaatacaaaaattagtcgggcccagtggcgtgtgcctgtgatcccagctactcgggaggctgaggtggaaggatcacctgagccagggaggtggaggttgcagtgagtcatgttgtttgcgccactgcactccagcctgggcaatggagtgaaaccctgtccaaaaaataaaaaaataaagctgtggcagaatgtggagattcttggaagctggaagctctcatggggcatttggaaacctcacattgtaaataacggagtctttttatcagtttggcttccttagttttaggaaacaagaaataattatggctaactcaagtaaaaagagaaagagaagagaaaaaagacgtggagatagagagagagggagagagaggaaaagacgaaaggaaggaagggggaaaggagagaggaagagagaaacagagaaacagactgattagtgtattggatagattacataaccaagtgaccagtcaggaacccagcagctctgggggagctcaatgtgatgcattgataaacccgctcttaagagcactcgtttccagttactttctattcggtgggtctccagccaagattccaggtcccaggagaatctgactgacctagtgtttgcttccgcctttgcggtctgggttctgtgcttgcagctcattagaatacagggagcagagacaagcaggtagtttcccaaaggaagggatgctgagtagattaaaaaaaaagtgtagattcttcagtaaactatgggatggtaactatgcaaaacctaagatttcccttattcaaataaattatctttcatattagacatctaaatatgcactaatttagttaaacccctgggttagttgatctcatcacactgagctaacatttttgttgctgttgtttgcagtgacctgaagtttcttatcttcacaattgctttcctctcaaataattcccagattttaaatttttattttattttttctggagacggagtctcgctctgtcgcccaggctggagtgcagtggcgcgatctcagctcacttgcagcctctgcctcccgagttcaagcgattctccggccttagccttccaaccagctgggactacaggcgcgcgcccccacgcccggctaatttaattcccagattgatatccattgcttctgagatgggccaattatccttcggagaagacttaggtcgcctggcagaaaaagatgaaagaaatctaagaaaacgacgacactgagagaggagcctagcgaaccagcagagcgaccccaagccgcaattcccccttccgtggatcgattacgaaggcttcctggcaggagctctccagggctgccgacgtgagccgaactgcacattgggaactgtagttgagtgggaaagccgagaggcgggggccgcacacgcgtacaggggccccggtcaacaaagacgcgccgtgcgcgcgcgcgccggagaaaaacacgggaagacgtgcgcgtgcgcggccgccgctgggagccaccaggcggcggagaggacagcgacaggaagggaggggcccgagccaccgactgcaggaggagaaggggttgtgctcctggccgaggaaggagaaaggggcggggccggcgggcagcgtgcggcagtgcggagctcctgagaccggcgggcacacgggggtctgtggcccccgccgtagcagtggctgccgccgtcgcttggttcccgtcggtctgcgggaggcgggttatggcggcggcggcagtgagagctgtgaatgaattctccgggtggacgagggaagaagaaaggctccggcggcgccagcaacccggtgcctcccaggcctccgcccccttgcctggcccccgcccctcccgccgccgggccggcccctccgcccgagtygccgcataagcggaacctgtactatttctcctacccgctgtttgtaggcttcgcgctgctgcgtttggtcgccttccacctggggctcctcttcgtgtggctctgccagcgcttctcccgcgccctcatggcagccaagaggagctccggggccgcgccagcacctgcctcggcctcggccccggcgccggtgccgggmsgckaggcckagcgcgtccgagtcttccacaaacaggccttcgagtacatctccattgccctgcgcatcgatgaggatgagaaaggtaactagggggctgggggagggggcggcggcgccgggaagaaggcggtggggtcgccgggggagggcaacacctgcgtcccttttctgcgggaggggacggtgcacccccggaattgatatgccccgggagactgctttcccgtaggtcggagcctcatcttctagtattcttaaaacctctcccctttcagggcactgtagctgtcgactttgtttcagacaccagccttcccccacacttctgcatgacccaggtcactatgagacacccagacgtgttgatgacagtgacatttgtcctagagtgaccacactgatcctttctagcactgtgaagagtgtgcagcttcctctgaaccaaggtttccaaaaggttttgatattgaagaagcagtgccgccttactggcttttaatgaaagcagagtaytgtagtgtcagaaaaaaagaacaaatggtgacaattttgaaagaaatagctgcatatgactgcagttgaatttgcatcattttaatcaagataatcattttatcagtacaacgattcctgaatactttttcaatgaagttatatttagcataaaacttttccccctgttgctttgattttaattaaaacagtattccaaagtagcctttaatttccaagttgaaatgtttgatgaatggattgcgtaaacttaaacataccactttacagtaaaacctaaaacaactatgtatktttctgaatgaaagcaaggatactacatctttcgggtttcttttaagctaacttttttttttttttgagacggaatctcgccctgtcgcccaagctggagtgcaatrgtgcagtctcggctcactgcaacctccgactccctggttccagcgattctcctgcctcagcctcccgagtagctgggattacaggcacgcaccaccacgcctggctaatttttgtatttttagtagagtagggatttcaccatgttggccaggatggtctccatctcctgacctcgtgatcggstcgcctcggcctcccaaagtgctggtaatacaggcatgagccaccgckcctggccttaagctaacattttttattatatgtgccaggcattgtgctattagctttgcatgtgttatcttttttctttttaaaaaaaatagcaaccatcccagaccatgaaaagtgttatttaatcctcacaataactttgtgagatgaaggtattattggtatcagcattttagagatgaagaaaatgaggcccaaaagataaaggaggttattccaaacctgtgctaataatgaaatttcttttatggaaaataagtgaaattaggagaagtctaacttttacaattctccccttttatccttacttccagtatgctgagatcttgcttctccctctgccaaaaacacccacttttctaccacacctcaattagatactcacttgcattgtccattagtgaaaacagaaacaatctgcacttcattcatagtgtctgtctctactgccaactccaaaaactgttctagaatttcaatcttgttgaaacctgtttcctttgtggggcctgggagtgggaagtgggatataaggaaagaggcagttattcattgttttggacagtaaggaaagagtgacggttaagagaggtcaaggagggtgttaacatttaagaatactatgtgtttgtagaaggaaattttttgttaactgctccattcttttttttttttttttttgagatggagtctccctgtgtcacccagactggagtgcagtggcgtgatctcagcttactgcaacctctgcctcccagacgcaggcgattctcttgcctcagtctcccgagtagctggaaccacaggtgcgccctatcacggctggctaattttttgtatttttagtagagatggtgtttcaccatgttggccagactggtcacgaactcctgacctcaggtgattcgcctgcctcgaccttccaagtgcttggattacaggtgtcagccactgygcccacccagcaagctccattctttatcacctcttaagaacatccaggatcccttggggagaattaaaacggttgcaaagttttagaatagaggaacatgtttaagcgtagatcattttttgggccagtcatggtggctcacgcgtgtaatcccaacactttgggaggccggggcgggtggatcatgaggtcaagagtttgagaccatcctggccaacatggtgaaatcccatctctactaaaaatacaaaaattagctgggcatggtgacayatgcctgtagtcccagctactcaggaggctgaggcaagagaagtgcttgaacctggaaggtggaggttgcagtgagccgagatcgtgccactacactccagcctgggcggcagagcaagactccgtcttgaaaaaaaaaagtaggtcatttttggctgggcacggtggctcatgcctgtaattccagcactttgggaggctgaggtgggtggattgcttgagcccaggagtttgagaccagcctgggcaacatagtgaaaccctgtctttgtgaaaaatacaaagattagctaggygcagtggcaaatgcctgtagtcccagctacttggggggctgaggtaggaggatcacttgagctcaggttgttcaggctgcaatgagctgagatcgtgcaactgcactccgaactgggtgacaggagtaaaactgtctcaaaaaaaaaaaaaaaaaaaaaccaaaaaaaaaaaaactgttttaattgttttatttaggaagagaaagtcagaacatgcaaggaaattttttttatttgtttatttttgagacggagtctcgctcagttgcccaggctggagtgcaatggtatgatcttggctcactgcaacctctgcctcccggattcaagcgattctcctgcctcagcctcctgagcagctgggattacaggtgtatgccaccacgcccagctaatttttgtgtttttagtagagatggggttccaccatgttggccaggctggtttcgagctcctgacctcaagtgaaccgccctccttggcctcccaaagtgctgggattacaggtgtgagccgcggtgaccgaccacaaggaaattttagttaacactgttggttgatgggagttgggaggtaggataaaaggagaaattaaggaaaacctaggcatgaaaaataaaagaccctgagctcttagatttgaagaaatagcagttccatgtgaggaataagtggaagaaatagaattcagacctcaggtctcaggctggtgacttaaatctttcagtatcacatatatgaatatatctattatacttaaatcctcctaaacatttttatttttcagttggatatattaaatatataaaaataattatttaatttattttagagacagtgtttcactctcttacccaagctggagtggaatgtgatcatagctcactgcagcctcaaggctcattcctaggcttaagtgatcctcttttttttttttttgctagagataggatcttgttatgttagccaggctggagaaatttcaacaatattttgaacaataaaaaaaaaataaattaggttttattgtaaagtggtatgtttaagtttacgccattctcctgcgtaatgcatatttcatactcttcctactgataatgtttctgttcacaactttttctttatattttgatttcttttctcttttctttttttttttttttgagacagagcctcgctttgtcgcccaggctagagtgcagtggcgcgatctcggctcactgctagctccgcctcccgggttcacgccattctcctgcctcagcttcccgagtagctgggactacaggcgcccgccaccatgcccagctaattttttgtatttttagtagagacggggtttcactgtgttagccaggatggtctcgatctcctgacctcgtgatccacccgcctcggcctcccaaagtgctgggattacaggcgtgagccaccgcgcccggcacatattttgatttctaatgtggacatcagaatgggctgttgacagctcttttttttttttttgaggcagagtctcgcttcttcacccaggctggagtgcaatggcgcgatctcagctcactgcaacctccacctcccaggttcaagcgattctcctgcctcagcctccccagtaactgggattacaggcatgtgccaccccacacccrgccaatttttgtatttttagtagagacagsatttcaccatgttggccaggctgttctcgaactcctggcctcaagtgatccactcgccttggcctcacaaactgctaggattacaggtgtgagccaccgtgcccagccttgacaggtctttagtttgattttagttcaacaactgatgccgtaatatgccaaattaaattagttcagactgaaacggattacttaaagattcattttcctttaaaaatgaagtaaaactttagccggatgtggtggcgggtgtgtgtaatcccagctactcgggagggtgaggcaggagaatcgcttgaacccaggaggtggaggttgcagtgagctgagatctcacccattgcactcctgcctgggtgagaagagtgagactccatcaaaaaaaaaaaaaaaggctgggcatggtggctcaagccgggtgcagtggcccatgcctgttatcccagcactttgggaggcagaggcaggcggatcacttgtagtcagaagttcgcgaccagcctggccaacatattagtgaaaccccgtctctactaaaaatacaaaaattagctgggcatagtggtgcacgcctgtagtcccgggtacttgggacgctgacgcaggacaattgcttgaactccagaggtggagattgcggtgggccaagatcacgccactgcacgccagcctgggcaacagagcaagactccatctctcaaaaaaaaaaaaaaaagaaaactgagtttatattgttatggttcttatctatcttaaattttttctttaggagattgaatatttttgtactttagtcttaatccagtggttgaaagagagtgcacttttgaagtctgcctcttggctgtccttgacaacacaaaccttagttccaagagaatgtaattcttcctctttctcastgcttcaaaatatatatgatcaaatagaaacgagttgaataggcagtctcttcaaaggtttcctaactctgtggttaactatcaaggagctggtaatatcatgcactgccattcccttggcaacatgacttatcttttttttttttttttcttttttgagacagagtcttgctctgtcacccaggctggagtgcagtggcgagatctcagctcgctgcaagccccgcctcccacgttcacgccattttcctgcctcagcctcccaagtagctgggactacaggcgcctgccatcacacctggctaattttttttgtattttttagtagagacggggtttcaccgtgttagccagtacggtctcgatctcctgtcctcgtgatccgcccaccttggcctcccaaagtgttgggattacaggtgtgagccactgcgcctggcctacttatcttctaatttaactgaaaaccaatttatttgattcagtgaaatggcatcaaactgtagtagtgttaattgaaatatttggtaccttgaaatgttaaatgccaaattaaatctcattttaatgaaatctcgtgtaaatgtgttttatatggtgactatgtttattctgaattttattcttatggcatactaaaaaaaaaaaaaatttttttttttttttgtaatggagtcttgctctgtcacccacgctggagtgcagtggcgcaatctcggttcactgtaacctccacctcccgggttcaagcgattctcctgcctcagtctcccgagtagctggtactacaggcgtgcaccactatgcctggctaatatttttgtatttttaggagagacagggtttcaccatgttggtcaggctgatctcgaactcctgacctgaagtgatccgcctgcctcagcctcccaaagtgctgggattacaggtatgacccactgcacccaacccatactcaaatttgacactgaattttcataaaggccttaatttatctgaaaccaaactatttcaaaagaggaatagcacagcaaattctgttgacttaatgagaggatatgtgaagtctatttattaaagcaaatattaattggaggccagttaatttgtacagctctgcattttagatatttgagaaatatttatttcctctccagtgagatgtgttaaaacattagttatgtgattaacaaatatgtgtacatacrtatatatgtacatacacattttgagacagggccttggtctgttgttcaggctggagtgcaatgacaccatcttagctcattgaagcttcagcctcgcaggctcaatcgatccacccacctcagcctccctagtagctgggtctacagacatataccaccatgcttggctgattttttaattttttgtagagatggtgatcttgccctgttgactaagttggtaaatattttaattgttgaactttcttggaagactgaaaacctgtgatagccattttatataaggagaagctgaagttcaaagagtagactcatagcagaaacaaaaatagaatttaagtgaatggactcaaaatattgtactttttactttatactgcaggtttttatgttgtaatgctggtaatgagctccttggaatatttggaggaaaagagaaggttgtaataatggttctttggatttactagaacatatcatgttctgcatggctcctgtgggtagacaagccggaaatctcctgggtaacacaatggtggaggttctctaggtgacgtttgatttctcaagtacataggactaaacagaaaaggcctagtatgttatatgaatgagagatcaagtttctcaggatattctagggctaaaggatcaggcatcgaagacagaaattgtctaaataaaattttttctattcatagttttaaagggctaaagggtcaggcattgaagacagaaattgtctaagtaaaatatttttctgttcatagttttaagctgtgtatatgtgcatgtgtgtatttaaaataacttcgtcaatgaaaagagtcaaactctgtaaaatatttgaagagatttattctgagccaaatatgagtgaccagtggcccatgacacagccccagtagatactaagaacatctgtccaaggtggtcaggctatagcttgattttatacactttagggagacataagacgtcagttaaacatgtaagatgtacattggttccatctggaaaggcaggaaaactagaagttggggaggcttccaggtcgtaggcagattcaaagattttctgattggcaattggtcaaaagagcttatctaaagtcctggaatccatagaagggagtgtctggtttaaaataataggttgtagctaccaaggtttttattgtacagatgaagcctccaggtagcaggcttcagagagaatacattgtaaatgtttcttatgagactttaaaaggtggcagactcttaagttaattttctcctggttcaggtaaaagacttggaaagggaaaggattctctacagaacgtaaattttccccacaagagaaagctttgcagggccatttcagaatatgtcaaagaaatataatttagggtaaaatacttcaatttgttttatttatttatttattttttgagacagagtctcgctctgttgcccaggctggagtgcagtggcatgatctcggctcactgcaagctccgcctcctgtgttcacgccgttctcctgcctcagcctccygagtagctgggactacaggcgctggccaccatgcccagctattttttttgtatttttagtagagacgggatttcaccatgttggccaggatggtctcgatctcttgacctcgtgattcacccgcctcggcctcccaaagtgctgggattacaggcgtgagccactgtgcccggcctcaaaatacttcaatttctttcatggcctgctatctgacgtgatgctgtactagagtcaggctgggaatttggcrtcttattgctacaaaacatcttaatatctctgttttaatgttaatgctgatcagttgtccctgaattccaaagggaagagggtatatgagtcatgtccaacccccacttctcattatggcctgaactagttttttaggttaactttggaatgcctttggcaaggggagggtccatgagtcagttgggggtcttagagttttattttttgcttaccggtttataaaaagttaatgaaaattatcatatttcataattctatataattcaatattgtactttatttaaaactcacgtataaaatagctgtccatatctgttttcagaagatgaggatggagggtagaaatcagaagtgtcagatttggtaattttcttacactgctgaaaacctatacctaccactttgaaaggattaatttcagacttgctttctttgggcctaatgattctactttgaagtttctctgattaaactaaggaataaatctgataaatggacattcagatgataccatacttttccaaaagataacattgcttttgattacatatgcaataaacatttcacattttttctcaagattwtttactggcatctgcaccaaagacacaaaaaagcagccactgttaaggactttatcccttgttctgtttttagctggtttgttgttgkatttttcctcatgttgaatacagttaaaccctattaaactggattccccatattactgttagttgtcctgatgacaattaaggatagttagtaaatggatattgaatcattttatttttttagtagtgatggcgtttcgctgtgttggccaggttggtctcgaactcctggcctcaagtgatctgcctgtgttggcccctcaaagtgttaggattacaggcgtgagccactgcacctggctggatattgaattattgaagaaggatgttccctaacacttcctgcctcttttccgctgtcttactctctctgttccacccagtagtagttgggtttttgatgtctggcaaagtatagattgtctactcttctatattagttttcttcactcttttttttaaaaatgtttttaaagcaagatagagacagggtcttgccgtattgcccaggctggtcttgaactcctgagctcaagcaatcctcccacctcaccccataaagtgcggagattacaggcatgagccaccatgcctggccagttttcttcactcttgacctataatagtcctgcaaagccagtgaagctgttaatatgctgacgtagcctttttttctctcgtttgtgaattattaacaatcgctgatcttacacatcatatacaataaaacatctttgaacactgtcacatctcagcagctcattctggttaatgaggaaagaaaaatgtcaaaatctgtgattttcttagaggttattaaatgttttacagctatgtagatattctgtagacttgctgtacttacttacataacttttctgctcttctgcagagggagagaattaacttcataagtgggctttgtcaatgccctccagtcagcgatctccaggaacaaacttatctatggttgagcaagtggggtttattacccactgtagccagggagaacacacatatgtaataaccatggtatgtcatagtaaagggtgttaggaagataggatttgggctcgtttatttggtgattttaaggagggtttaaagaagcagggttttgctctgatttggatgctaccaggagctgcgaataattctatgaataaatatcataaaacctatctagaagaaaagactagagtgaggtctaaagctgtagtagttaaaaagcaaaggtcactccttatctggaaaaggggaatatttggtatttcatggtttagacagtgttcagtgttcatgttttgcctgtgtttagacataattgtagagtggtcttgttccaccgtggtcacagagtggcattatttcatgctgatattctgtaagtgccaggtcaaataccaaggtttagctgatagtagtaggccagctcctggatgtaataagctgtttttctctttctcagcttttttttttgttgttttttttttaaaatagagtctggctctgtcacccaggctggagttcagtgggggcaatctcagctcactgcagcctctgcctcctggattcaagcgactctcctgcctcagcctcccaactagctggaattacaggcgcaagtcaccacacccggctaatttttgtatttttagtagagacggggtttcaccatgttgagcaggctggtctcgaactccggacctcaagcaatccatctgcctcagcctcccaaagtgctgagattacaggcatgagtcactgcacctggcctgtttcttagatttgagggtcaacttttacccttttcgaactgtggggcttcttatggaaattgacatttaagtcctgaccatataggatcttgggcaagttacttaactatgtatgctgagatgtttttttaaatgcttagtgcttgcacataataggtactcagtaaatgagaactattattataaaatcaatagtacttttaagattacagctagaggttatgttagaacattgttaactcttcgtactagtttctgttacactttttaggatgcagtagcagcataaacgagatatggggaagaacgagaggtatttaaacagtgatataggccgggcgtggtggctcacgcttgtaatcccagcactttgggaggctgaggtgggcagattacgaggtcaggagattgagaccatcctggctaacacggtgaaaccccatctctactaaaaatacaaaaacaaaattagccgggcgtggtagtgggcgcctgtaatcccagctatttgggaggctgaggcaggagagtggcgagaacccaggagacagagcttgcagtgagccgagatcgcgccactgcaccccagcctgggccacagagcgagactctgtctcaaaaaaaaaaaaaaaaaaaaattaaaacaaaaatatttgtgttaattgtgatgacaaaaaaaaaaaaagagatggaagtctctccctaacctcactcctcatttagtgtcatggcttttttctttttytttttttttttttttgagacaaagcctcactctgtcacccaggctggactgcagtggtgcaatctcagctcactgcaggctctgcctcccagattcaagcaattctcctgcctcagcctcacaagtagatgggactacaggcacatggcaccatgcccagctaattttttgtgtagtttttagtagagacagggtttcactatgttggccaggctggtctcgaactcctgagctcaagtgatcccccctccttggcctcccaaagtgctgggattacaggcgtgagccctgctcccagactcctggcttttttttttttttttaatgaaaaattcaaaatgctyttttttttttttttttttttttgagacagagtctcgctctgtcgcccaggctgaagtgcagtggtgtgatctcggctcactgcaacctctgcctcccaggttgaagtgattctcctgcctcagcctctcgaacagctgagattacaggtacgcgccaccacgcctggctaatttttgtatttttaatagagatggggttttgtcatgttgtccaggctagccttgaactcctcgcctcgtgtgatccacctgccttggcctcccaaagtgctaggattataggcgtgagtcgctgcacctggccacagaaattttttgaagaagataaataaggtgacatttttaagggtcaaagaaaatgtcaaaaactagaatgatgtctttacatagggtttaaaactttccaaattaacagggaaaataattctttaccttgaaaataaatgtttgctagtgaaagcaaatacaatctttttactaaatgttttattaaatttttttttcttgtagacacagggtcctactgtattacccaggctggtcttgaatgcctggcctcaagcaatcctcctacctcagtcttccaaagtgctgggactacagacatgagccatcacactgggtcttttttaccaaattatagtagaaagcactttttctctaatrgtgaactatgagagaattaatcaggggctattagtaattcatccctgaattaatcagtgattataatgctttgtggtccatgtagtttgctggggattaacacaccatgaaagtctaccaggagatttttttttttctttgagaacaggggccataatcagtagtccttaaatgaaatggactattcccatttcattatatgttgcctaggctggactcgagctccttggcttaagtgatcttcccacttcagactctcaagcagctgggactataggtgtgtgccaccatacctggcttaattgagtgtttgttttttgtttttttttctgagacagagtctcgttgtgtcgcccaggctagagtgcagtggcacaatctcggctcactgcaacctctgtttcccaggttcaaacgattctcctgcctcagcctcccaagtagctgrrattacaggcgcctgccaccatgcctggctaatttttgtatttttagtagagatggggtttcaccatcttggccaggctgatctcgaactcttgacctcatgatccacacaccttggcctcccaaagtgctgggattataggcgtgagccaccgcgcccggctttaattgagatttttagatatctattactctgctaattttgtcacttgcaagttgccatcagaaaattgtaggaaaatggatatatttgttccttggaatggtttgtgtgagaatacttaaggattaaatagataagtaaaactggtgggctttatataacatagatgagcaaatgtcaggaacatacaactgtgcacacagttcaggagaaggaggatttaagttaatcaacaaatttactaagtataataaagatactaaaagtagtgtttccataccactttattacttaaagtatcatcatataccctattttatatgatttttgccacaagtcagagttaggtaaaagaaatacttgcttttcaggtaaggagtttgacgcccagacagattaactgacttttccaaaatcatattgctattaaatggtggaacaaggacttaaatctttgccttctaactcacatacttgcaaacacatatcctctcactctaccccaagctacccatgttttgacccttcttgtggcaatctgggtctcactaatatttgaaagaaaacgtacagtagataatttgcaagttaatctgttacgcatatctcttacctctatttaaagatgaatatcagcatttctgttgtttctacagtaacatactaaaaaataatgcagtccaggtgcagtggctcacacgtgtaatcctagcacttttggaagttgaggcaggaggatcacttgaagccaggagttcgagactagcctgggtatgcaagaccccatttctgttttttttttttgtttgttttgttttgttttgttttgtttttttgagacggagtctcgctctgtcgcccaggctggagtgcagtggcgggatctcggctcactgcaagctccgcctcccgggttcacgccattctcctgcctcagcctcccaagtagctgggactacaggcgcccgccactacgcccggctaattttttgtatttttagtagagacggggtttcaccgttttagccgggatggtctcgatctcctgacctcgtgatccccatttctttttcactgcaacctttgcctcccaggttcaagtgattgtcgtgcctcagcctcccaagtagcttgggattacaggcatgtgccaccatgcctggctaatttttgtattttttggtagagatggagtttctggccaagctggccaggctggtctcgaacgcctagcctcaagtgatctaccctccttagcctcccaaagtgctgggattacaggtgtgagccactgtgcccggccccatttctacaacaattaaaaaatattagcccagtgtagtggtgcatgtctctagtcccagctactcagaaggctgaagtgaaaggattgcttgagcccagaatttcaaggctacagtgagctatgataatggcattgcactccagcttgggtgacagagtgagaccctgtctctaaaaaatgaagtaaaatagtgcacaagtatagaacttgaaaawcttccttaaccttaccataagggaaatgattactaataagtttcttaactttttgtacttacataaacataaatattcatcagagaaaaaaatatgcaaaacaatttgcaatctttttcacttaccatattttggaatttttttcatttcaatatatttgatcttccttgtgttttttcagtttgtttgtttttgtcacccaggttggagtgaagtggtaagaacatggcttattgcagcctcaatctcctgctcccattcagcccctcaagtagctgggactacaggtacatgtcaccacgcccrgctaatttttatttttattttggtagagatggggtttcaccatgttgcccaggctgatcttgaattcctgggctcaagtgacccgcccacctcagcctcccgaagtgttgagagaacaggtgtgaaccaccatgctccacctcttagtctttacaatctgcaaaacctcataagtggctaatagaggaatatagtaaagcaaagggggatatcactgattagaactgtgtttttaggctgggtgcggtggctcacgcctgtaatcgcaacattttgggaggctaagtgggagtatcacttgagcccgggagttcaagaccagcctgggcaatatagtgagagaccctgtctttagaaaaaaattaaccaggtgtggtggtgcacacctgtggtcccagctattcaagaggctgaggtgggagaatcgcttaagcctaggaggcggaggttgcagtgagatcataccactgctctctagcatgggtgacagagcgagacccagtctaaaaaaaaaagtattttttcgtttttttccaactcatgtacacccgccaccccacccctgctttttttttttctgacattgggtcttgctctgtcacccaggctagagtgcagtagcacaatcaactcactgcagcctcctcttcctggactcaagcagtcctaccacctcagcctcccaagtagctgggaccacaggtgtgcaccatcatgcctggctaatttttgtactttttgtagagatagggtttcaccatgtggttcaccatctctaactcctgggctcagtcagtccacttttgcctcggcatgagccactgtgtgcagcccacgttttttattaatggatatttggattgtttccatctattgtgaataatgtggctrtgaacattggtctaaatatctgtttaagtcccggctttcartacttttggatatatacctaggagtagaattactgaattatatggtaactttctgtttaaatttttgaactgccaacctgttttccataggggctgcaccattttgcattcccaccagcagtgtacaagggttccagtttctccacatttgttatttttcattttttaaaataatagtcatcctaaagggtatgaagtggtatctcgttgtgattttgatttgcatgtatttttctaatgacttatgatgctcagcattttgtcatgtacttatgtaccatttgtgtatcttctttggaaaaatgtctattaatgttcttttcccattttttaattgggttgtttttatgtttatcaattttgtaaacattttaagctctgcagcataactactcaaccctgtcacatggtaagattgacccagtaaaactttatgtacaaaaataggcagcttactagatttaatcttagtccatagtttgctaaggcatgcattagataatgtagttacactattggctataatgtagttacactattggctaataatttaaactacaagtggttgtaagtttctgccacccaaattctttcttgatttgatgtagtctggttggttgaatttgagtgttatatggggtcatagagttaaaagagaaatgtctatgagaaactagggactgttgggagctaatgttaaaggattttggaggccttttgtgcactggagaccattggaagattggattttctgctataaatgtatctaaaggataatcagtgtaagttatgggctgtagtttgccaacccctacattaagggattgaaataatttgaatatgggtttcagttcttgtatggtctggctcagttctttttttttttttttttttttttttttttgagatggagtctcactctgttgcccaagctgcagtgccatggcacgatctcagctcgctgcaacctccgcctcctggcttcaagtgattctcctgcctcagcctccagagtagctaggactacaggcacgtgccaccacatctggctaatttttttttttttcaagacagagtttcgctcttgtcacccagcctggagtgcaatggcacgatcttggctcaccgcagcctccgcctcctgggttcaagtgattctcctgcctcagcctcccaaatagctgaggcaacaggcgtgcgccaccacgcctagctaatttttctgtttttagtagagatggggtttcaccatcttggccaggctggtctcgaactcctgatctcatgatccacccgcctcagcctcccaaagtgctgggattacaggcgtgagccacctcacctggcgtttttttgtgtgtgttttcagtagagatggggyttcactgtattagccagaatggtcttgatctcctgacctcgtgattcacctgcctcagcctcccaaagtgctggaattataggcatgagccaccacgcctggctgtggctcagttcttaactgttcattcattcagggtcccagccaaaatcttttgccacagcttctcctgggcatgctctgaaattcattttttgtctgtttagttgcatgagtccactgaaagctttgcttattttctccaccactttcagagttcacagtcacttcaagtagacgaggtcaggagatcgagaccatcctggccaacatggtgaaaccccgtctctactaaaaatacaaaacttagctgggcgtggtagcgtgtgcctgtagtcccagctactcaggaggctgaggcaggaaaattgcttgaacccgagaggcagaggttgcagtaagccgagatcataccatttcactccagcctgggcgacagagtgagacactgtcaaaaaaaaaaaaaaaaaaaaaaggaaagaaaagtgctccaaatgctgggctcatctctgctggcttctctcctttttatatttcgataatttttaaaataataaccatcctaatgggcttgatatggtccctcctttctaaattttggtaattttcattgttttggaaactcactaatcccttcaaacagatgtttttaaaactttttttctagttctctctcttttttttttttttttttttttgagacagggtctctctcagtggtgcgacctcccttactgcaacctctccctcctgggttcaagcagcgattctcctgcctcagcctcccaaatagctgggagtacaggcacccacccccacgcccagctaatgtttgtatttttagtagagattgggtttcatcatgttggccaggctggtctcgaactcctgaccccaggtgatccgcctgcctcagccttccaaagtgctgggattacagccatgagccaccgcacctggctctagttctcttctaatcttactatagtaatcaaaattttagtgctgatgttataatccaagcccaaatggatattcttatacattaaatgttggaatatcatgtttgttaaaaatcagatctgctgggcacggtggctcaatgcctgttatcccagcactttgggaggccgaggcaggtggatcccctgagatcaggagttcgagaccagcctgaccaacatggagaaactccgtctctactaaaaatacaaaattagccgggcgtggtggcacgtgcctttcatcccagctacttgggaggctgaggcagaagaattgcttgaacctgtgaggcggaggttccagggagctgagatcgtgccattgtactccagcctgggcaacaagagcgaaattccatctcaaaaaaaaaaaatcagatctgtccctatggttttatcttcactgcatgtcatatataaatggaagcatgtagtatgtagccttttgtgtctcgcttctctccctttgcataatatttttgagatttatcccttttcctacatatgtcagtagtttgtttctttttaatgctgaatagtattccacgtgtggagataccacaatttgttactccattcactaaatgatttgggttgtttcctgtttttgttattgttgttgttgttgtttaattaattaattaattttttttttgagatggagtcttgctctgttgcccaggctagagtgcagtggcgcaatcacagctcactgcaacctctgcctccccggttcaagtgattctcctgcctcagcctcccaagtagctgtgattacaggtgcccgccaccacaaccagctaatttttgtatttttagtagagatgggatttcaccatgttggccaggctggtcttgaactcttccctccttggtctcccaaaatgctgggattacaggtgtgagccaccatgcccatcctcctgtttttaaattttatgaataaaggtactgtaaattcatgtacaggtcttagaagtttgcatttttcttgggtaaatatgtagaagaagagattgttgactcatgtggtaaatatatgtttaatgtcataagaaactaccaaactgtttttccaactgggtgccattttgtttcctaccagcaaacataatgaaaggtccattaccctttgtctcgtaatattttggtatttttatgttcttttgtttttttgccattcaaaattgggtgcattgttgtatctttggattttaatttgtacttccctaacaactaatgatgtggagcatctttttataygcttacttgccaattatgtcttaattctttggcaatacttatatttgactctgcctactatatatatatatatatatttttatgctatatatagagtatatatatttttatactatatatatttatatatactatatatatatatatatatatatatatwtwttttttttttttttgagatgaagtcatgctctgttgaccaggctggatgcagtggcatgatcttggcttaccgcaacctcaacctctgcctcccaggttcaagtgattctcctgcctcagcttcctgagtagctgggactacagacacatgccaccatgcccggctaatttttgtatttttagtagaggtggagtttcgccatgttgtccaggctggtcttcaactcctgacctcaggtgatccacccgcttcagcctcccaaaagtgctgggattacaggcatgacccaccgtgcccagctggaataagcaatcttaaaaagcagtttgttgatttctggtgaatagagaaaatgtgacaaactatgactcaatagtttcatttcttttttgtttgtttgtttgtttttttgagacagagtcttgctctgtcacccaggctggcgtgcagtggctcactgcaagctctgcttcctgggttcacgccattctcctgcctcagcctccggagtagctgggactacaggcgcccgccaccatgcctggctaatttgttttttgtatttttagtagagacagggtttcactgtgttagccaggatggtctcgatctcctgacctcgtgatccacccgtctcggcctcccaaagtgctgggattacaggcatgagccaccgcccctggcctacttttatttcttaagcatatatcttaaagaaactgcaggtatgcattaggggacaggtagaaaaatgttacagcattgtttgaaatgttgaaaaactggaaacaacctcaatatcttaataatagaaaaaatggttgaggctggctgtggtggttcatgcctgtaatcctagcacttttggaggctgaggcgggcggatcacctgaggtcgggagtttgagtccagcctggccaacatggtgaaaccccgtctctactaaaaatacaaaaaattaggcaggtgtggtggtgcacacctgtaatcccagctacttgggaggctgaggcacaagaatcacttgagcctgggaaatggaggttgtagtgagccgagatcatgcctactgcactccagcctgggcaatagagtgagactccgtctcaaaaaaaaaaaaaaaaaaaaaagggaaggagcatgggaatgggaagaggcactaaaaaaggaacttcttttgtatctgttacattgtactcattttgtttttaaaattttaagccaaatatgacattgttatcacttttgttgccactcagaatacaagtgctattacactattttctataattttccctttttcaaactaaaaaacaaaaatacatgtaaacaggtgttttctttatggaaaacaggaaggtgagcatccaaataattttagttaatttataacaaactcttaataatttctttttcttcttcttctttttttttttttttttttgagtcagggtcttgctcttttgctcaggttagagtgcaatggtacaatctggtacaatcacatcttagtgcaacttctacctcttcagctcaagtgacctctctcctcagtcccccaagtagatgggaccacagatgtgtatccccaatcatggttaatttttaaattttttggtagagataaaatctcaccatgttgcccaagctgggcttgagctcctgggctcaagcagtcctcctgccttggcctcccaaagtgctgggattataggcgtgagcaaactgtgcccagtcttcataaacttttctttacatgtccttatcaagtactttttgagcaccwactgtcaaccagccgtagtatataatactgataattctataacataagaaattgacctgtttaaggggatgaatatggttagttattttcagggtgaagaaacagaagaatcggggaggtagtacatagtcataaggagacggcatttcttagtcactttgtgtggtgtttataataagacttcatgtggccaggtgcggtggctcgtgagcgcctgtaatcccagcactttgggaggccgaggtgggaggatcacaacaaggtcaggagatcgagactatcctgaacaacatggtgaaaccccgtctctactaaaaatacaaaaattagctgggtgtggtggcacgtgcctgtaaccccagctactcgggaggctgaggcaggagaatcgcttgaaccagggagtcggaggttgcagtgaaccaagatcgtgccactgcactgcagcctgggctacagagagagactccatctaaataaataaataaataaataaataaatagacttcgtctgtttcatcaagagtcattgtattatattgattttgaaatttcaaataataataaggaatagtatggaaatttttgtttgattaaatggggacatgaggccaggtgtggtcactcaggcttgtaatcccagcacttcgggagaccagggcaggaggattacttgagcctaggagttcaagaccagcctgggcaacatggcaagaccctatctctacaaaagaaatacacaaaaattagctaagtgtggtggcacatgcctgtagtcttagctactcgggaggccaagggaagaggatggatcacttgagcccaggagttggagggtgcagtgagctaggattgtgcccctgcactctagtgtgggtgacagcaagactctgtttaaaaaaaaaaaaaaatgaggccgggcgcggtggctcacctctgtaatctgagcactttgagaggccaaggcgggtggatcacctgagttcaagatcagcctggccaacatggtgaaaaccccgtctttatacttaaattacaaagattagctgggtgtgatggtgcacacctgtaaccccagctactccagaggctgagacagcagaatcgcttgaacccgggagggggaggttgcaatgagccragattgcaccactgcactccagcctaggtgacagagcaagactctgtctcaaaaaaaaaagaaaaaaagtctaagaagttaattttcattcagacaaatgttcaaaaataatagaaataaaacaaaaaattaattttcaaatatgtgatttgagtataacgatcactttacagaagttattctacatactttttgattatgctgagtttttaggtccttttaaagcttaacttgtatcaggaattaatgttttaaactagttgttgggttcaaagaaaatagaaatgtgttattaaatgccacacttgtaatctcatacagcagttctcatgatgcaatcaattgttaaataaaaacttcctctagagaggaggtacccagcaatgaacacattatatcagatttgaatatgagattaaacaatgctttttgtttcattgttattgaaatcatatttgtatttttcaaaagtatatatacttaaaaattcctaaataaaatgtctttctgtaatacwgcattttaggttataaggatcaataccatgggctgataagcaaaataggactcacggccccaaaatgttgataaacatcatgaccatattccccataatggagttacatatacacattacaatgataaaaatactaagaagttatatagtaatgtttctcagacttgttcacaaccctgttttttatgtattacctctcaamagcatgatttgcaatatttagtgtactcttcatacgatctatacaaataattttttattttaaagcaggacagaaggagcaagctgtggaatggtataagaaaggtattgaagaactggaaaaaggaatagctgttatagttacaggacaaggtaagattgtatttgtttatagccatcccaaattatgatatattcacatgatygtccagatttcagatctatttatttatttatttatttttctttctttcttttcttttcttttcttttttttttttttttttgagacagggtctttcctctgttacccaggctggagtgcagtgatgtgatcatagctcactgcaacctcaaacttctgggctcaagtgatcctcctgcctctgcttcccatgtagctgggaccacaggcgcacactaccatacttagctaattattattattattattattattattactagtttttgagacagagtctcgctcttttgcccaggctgtagtgcaatggtgcaatctcggctcactgcaatctccgcctcccggattcaggctatttattctcctgcctgagactcctgagtagctgggattacaggtgcatgccaccgtgcccagctaatttttgtatttttagtgaagatggggttttgccacgttggccaggctggtttcgaactcctgatctcaagtgatctgcccacctcagcctcccaaagtggtgggagtacaggcatgagccactgtgggccacacttagctaattaaaaaaaatttttttgtagagacagggtctcactgtgtttctgtgactgatcttaaacttctggcctcaagtgatcctcctgcctcagctttccaaagttgtgggattacaggcatgagccactgtacccagccagattgtatttatcttaataaatgtatttgggccaggcacagtggctcatgcctgtaatcccagcactttgggaggccgaggtgggcgaatcacctgggatcaggagttcgagaccagcctgatcaacatggagaaaccctgtctctactaaaaattcaaaattagccaggcgtggtgtcgcgcacctgtaattgcagctacttgggaggctgaggcaggagaattgcttggacccaggaggcggaggttgtggtaagccaagatcgcgccattgcactccagcctgggcaacaagagtgaaactctgtctcagaaagaaagaaaagcaaaacagtatttcatttaattaaaaatgccttgtattataccagtaagagtaaaaaacaatttaattaaagtatgatatatgctcttttcatcacttagaatttgaattttaatcttattgaagaggctgttttagttttatttagatatggttataacaacaatattaatatctgtgaccaaattggtgcatgcatgggcaatgaaaagctatgttgtgactgcagcatggtggatagcattagtaagttagcattggttgtaaaatgaatcccaatttcaaagattttgaaacgtggggaaaaaatattttagaccccatgaaataagacctgaaatctatgaaataccacagtaggttggaaatcatcatgagaaactgtaactatttttttttataggtattatatgtattctttgagacagggtctcaccctgttgcccaggctggaatgctgtgaygtggtcacctctcactgcaacatccacttcctggggctgaagtgatccttgcaactcaccctcccatgctcggctaattttttttttttttttytaagtagagaccagatctctttatgttgcccaggctggtcttgaactcctgggctcaagtgattctgctttgtctgcccagagtgctgggattacagaagtgagccacaacacctggcctaaagatagtatttttaaaatttcttctgttttctttcttttgggtatacattttcttcttttttttwaaaaaaaatttctgtataaagactgtgactccccatgaaagtagtttgggtgataatttatcgtgaaacaatattagttgggaaatgtagatattttaattaatttttttctttcaggtgaacagtgtgaaagagctagacgccttcaagctaaaatgatgactaatttggttatggccaaggaccgcttacaacttctaggtatcaattaatgtataatttgatgtgggatgtattggaaatgtgtgttcaatgaaactttaatttgtagaaagaaatagatcagtgattgaaaatgtggtccaggctttttaacataaagaaaacgtataacatatacaaaaacagaagagcataatggacttctttttttttttgagatggacgcttgctctgtcacccaggctggagtgcagtggcgtgatcttggctcactgcaagctctacctcccaggttcacgccattctcctgcctcagcctcctgagtagctgggactacaggcacccgccaccacgccccgctaatttttttgtagttttagtagagacagggtttcaccatgttagccagaatggtgtccatctcctgacctcgtgatccacccgcctcggcctcccgaagtgctggagttacaggcgtgagccaacgcgcccagccgagcataatgaacttctaattattcttctctcagctttgataattatcacctcactatcagtcttgatttatttataccaagggctagcaaactgcagctgatgggccaacccagctcactgcctattactataaataaggttttattggcacacagccattcctttcctttaggtattgtctatggctttcatgctacggtgacagaattgaatagttgatacagagacaacactgccctcaaaacctaacatatttactgtctggccctgagaaagcctgccatcttcacttgacatcccacttcactgtcccccaacttcttattattttgaaacaaattattgacttattttccatttataaatatttcatattatacctctaaaagataaggatgtcaaaataaaatcacagaaataccattatcacacctaaaaaataactccaaatttcttttaacattatccaaaaaaactgacccccccaaaatgcaatttccaaatttctaattttctcaaaatttaataatttttactattttttaataatttgtttgtatcaggatcttaaaaagatccgtatgtctcttttaatgtacaggttcatctgtttttcattttcttccaatttatttgttgatgaaaccaggtctttgtcatgtaatatttcctacagtctgacttttgctgcatgcatcttttgtggtatgttttaacatgttcttctttcctcccacgttaaatgatagttggatatagagccttgatcacattgaaagttgatttttattttttaatgattagactacttcctaggtggttgtgtttgtgtgttcatcattagttgttccatcttgtgaggttagcagcagttaactatgactgatgtccagtgatactttaattctgtcattctttcagcattcatcaactgtaatagaaacttttacttgtcttctgtttgatggcgtaggttttaaatatatattaataagttaaatctaccactcaaaaaaagtagaacaaaacctactacatatgagtggctctaccatacgttggtggatggaaatagtagatatttggtaagcaggtaaaccttatttatttgtagccctgtgacttggggtaagttattttgcatgtctgggtcttttttatctaatttgtaatatgaagctattattattattattattattattattattattattattattattattattcgagatggagtcttgctttgttgcccaggctggagtgcagtggtgcaatctcggctcaatgcaccctccacctcctgggttcaaactattctcgtgattcagtctcccgagtagctaggattacaggggcctaccaccacacctaatttttgtatttttagtagggacggggtttcaccatgttggccaggctggtctcaaactcctgacatcaagtgatccatccacctcagcctcccaaagtgctgggataggccgggcacggtggctaacgcctgtaatcccagcactttgggaggccgaggcgggtggatcacgaggtcaggagattgagaccatcctggctaacacggtgaaaccccgtctctagtaaaaaaatacaaaaaactagccaggtgtggtggcgggcacctgtagtcccagctacttgggaggctgaggcaggagaatggcatgaacccaggaggcggagcttgcagtgagccgagatcatgccactgcactccaggctgggcaaaasagcgagactctgtctcaaaaaaawaaaataaaatmaatagataaataataataataaagtgctgggattacaggcatgagccaccacgcccagctgaagctaatattattagctaataataatatctcatatttttgaccattgaattattaaaggaacctaaaccatagtagtaagtgctttaaaaatgttggtttttatttatctgtttacctgactgtcatcacctcctttgcttaggtagaaagatatattcataaacacatacatatacattttattcattctttaattcatttactcctatatggtcattgtgtttgtgggatttttgcccgcacatagttaaaaatgcagccgttactgctttcagatgagtaacaaggtagtgttccctggcttctgtggctgacaggatttgccttcttcctttctaaatggaggttattactgtgtcagatataattaaatagtgtattaaagtttgttgcaataaaataattgatggttctaattggtactttctacgtgttttatctttaaagcttttcagtgtatatataaagtatatatcatacagaataaatttgattgtggagcattttgtaacatctttcaaaattaataagagttggtttttatgttttgtttgatgttatgatayaggacattagaagtattaatatcaattagagactcatctttgaatgtgactttgtactttcttatttgtgttagtagaggagagaacaaaaagaagatatgtaatgtaatatgaaactaggcatttaaagatttaacgttttggatattttaaagttggtgtctgttttcaccctcaaaaatgctattacctatttatgaaatatctttaaaagtgtggagtggtagatgggaaaggtgacatcggctgggcgcggtggctcacacctrtaatcccagcactttgggaggccaaggtgggcggatcacctgaggtcaggagttcacgaccagtctggtaacatggtgaaacctaatctctactaaaaatacaaaaaattagccaggctggtggtacgcacctgtaatcccagctactcaggaggctgagtcaggaggatggcttgaacccagaaaatggaggttgcattgagccaagatggcaccactgcactccagactgggtgacagagagagactccgtctcaaaaaaaaaaaaacgccgggcactgtggctcacacctgtaatcctagcactttgggagactgaggcgagcagatcacttgaggtcaggagttcgagaccagctgggtgcctgggcaacatagtgaaaccccgtctctactaaaaatacaaaaaaattagccgggcgtagtggcgggcgcctgtagtcccagctacttgggaggctgaggaaggagaatggcgtgaacccgggaggcggagcttgcagtgagccgagatcccgccactgcactccagcctgggtgacagagcgagactcygtctcaaaaaaaaaaaaaaaaaaaaaaatagccgggcatggtggcgggcacctstaatctcacctacttgggaggttgaggcatgagaattgctcgagcctgggaggcagaggttgcagtaagcagagaccacaccactgcactctagcctggatgacagagtgagactttgtctcaaaacaaaaacaaacaaaccaaaccacctcttgtccactcctaatctcccttactgtgtttcacttatttttttcccatatatttgtcaccttctaataaactgtgtaacttattttttatgtttattgtgtactatctgtcttctccctgttggaatataaactctatggaggagggatccttgtctatatcccaagtgcctacaacagtgtctagcacatgctagttaccgaataaatatttgccaagttaatraagttgtttataacccttggcactatacctgatacagtgtagggacttaataaatgaatgttaaatgaagctatcttaaaaatatatatatatatataacagccagatacgccaatttgccgacatcaaaattaatcttttcatctattgcaggttttacagttaagctttgctctaaggttcactatcactaaaccaaaaataaataatatggatggtcttttcccatttttaacagagaggctacatcctctcaaaccagtcagtattaggaattcccaggatcattctctccattttccatcctaattagatacctatctggcaccacatctctgaaaagctccaatttttaaccagcacataataaacaaatatgttactattaatacacgtttgtacacaagtcatttttattgtcttaggtatatccactcccagaccttctgagttattgaaagacaggaatttgtgatgtcacctcttttttcttttttttgagacggagtcttgccttatcacccaggccagagtgcaatggcgtgatctcggctcactgcaacctctgcctcccgggttcaagcgattatcctgcctcatcctcctgagtagctgggattacaggtggccctagtttgggtttttggttttaaacaggatggtctcctctttgagaagttgccatgagttagccatgatgatacctgggacaataatggtccacagagaagtaagagccaatacaacgccttaagagaaagtacctggtatgtttgtgaagcagcaaagaggccaatgtgttccagcaaggagattatagtagagatgaagtcagagaactcatgcggagagggattgtcacaacacgcagggctgtaaaggccaccatgaggacttgagcttttaccgcctgtgaaatggggagcagttacaaagatttttaagaaagcagcccagtgcagtggctcatgcctataatcccagctctttgggaggctgaggtgggtggatcacctgaggtcaggagttcgagaccagcctggccaacatggcgaaaccttgtctttactaaaaatagaaaaattagctgcgtgtggtggccatgcttgtaatcccaaatactcgggaggctgaggcagaagaatcacttgaacccgggaggcggaggttgcagtgagccgaggttgcgccactgccctccagcctgggcaacaaagcgagactccgtctcaaagccagaaaaaaagatttttaggaaaggaatgaaatactctgacttaaattttagaaggatcactctggttgctatgttgcattatagactctaagggtagaaccagggagagcaattaggacactgttacagtaatctaggagaaaagtgatagaggcttgcaccagggtagtatcaggagaaatggtaacaagtggttggattatgattatagttgaaggtcgaacaactagatttgctgatagattggataaaatggtcctctctttatggatctcataatacagtaggagaaacagacacataaatagtcatcactgcaggatgggkattagaaatattttgcaagggtgtaaaaggtgctaagaaagctttcttgtgtgmcaaagctggttaaagaaagaaaagaaagcttcctagaagtgaaacctaaaatatacacttagataaatgaataaaagttatgaaagaatgtgagggctgggcacagtggctcatacctgtaatcctagcactttgggaggttgagtcgggggtattgcttgagtccaggagtttgaaaccagcctggacagcgtactgagaccccatgtctaaatttaaaaaaaaaaaaaatagccaggagtggtgatgtgcacctgtagtcctagctacttacttgggaggctgaggcaggaggattgcttgagctcaggaggtcgagactgcagtgagccatgagtacaccactgcactctagtctgggtgacagagtgagaccctgtctcaaagaaaatgaaaagaaaaagaatttgagaaaagatatgtcaggaaaatgtgatgacatgaacaaatactcaaaggcaagaaaagcatggtgagtaggggagggtacaggttgagacatgaarttgggattgccgaggcgtaagaggtataggcagatcatggatggcctggtttgtcataggaaggagcttgggctcttatctgtgggcaatgggaagccactaaagggttttaagtagaagagtgttatatggtaaggttttcctctccagtagatcactcagatgactgtgggggttggatgtgaggaggtaaagcagcaaagttactgctttaatttaaatcattgattaatctgtacaatcctagtcattccaaaaagaaacattagtcctttaacagaagtgaattgggtctgggcgcggtggctcacgcctgtaatcccagtactttgggaggccgaggcgggcagatcacctgaggtcaggagtttgagacaagtctggccaacatggcaaaaccttgtatctactaaaattacaaaaattagctgggcatgggggcacccacctgtaatcccagctactcgggaggctgaggcaggagactctcttgaacccataaggcagaggttgcaatgagctgaggtcgcaccactgcgctccagcctgggcgacagagtgagactccgtctccaaaaaaaagaaaaaatattggagcagtttcacagatgctgtttactgttatactgtatgtgtctatgactcctcctccaagaaaaaaaaaatgaattggagcaggttcacagaagcaatgtactgttacactgtatgtgtctgtttctacacatataaatctgaattctgtgtacacgaaaagaaatcctatagctttttattcctagctataaaaactaagaatataatttctttctttttattacataatgaatggttctgttaactttttgttaaaatttcattgaggggagtattaattcacatttatgtacggatgtctacatttacaaatcagtgtattttttgatttatgcttttactgagacaaagggtttctgtctcagcatggtcatttaaagagtttatcattgagaaaaatcagatgaccaacctgttagctcaaaaaaaaaaaaacctccaaggtatattgtatcagccagttctaggatacaaaagccatgcagtactttgtgttttgtgccaaaaagggtagctgctatttgacctgtcccaaaggcatgtgtggttgtaccgtaaaccaagcatggtacctgtttgtcaaactttagaaatgaaagtttaagagagttaatatataggtgctgcattttttatgtattcattgacttgctggtacagaagaaaagaatcaattatgattcagcacaatactccacttggggaagagagtgcagcagtagtttagagtgtcagggatcaaactgctaccttcttgggcttcagttgctagacttaagagacccagatcttgggaggggtttttgttgttatttgatgtgggggtaaggttgaaatactcccttttaattgattaatataaaaaataggtaatgtagacgtatgtcacaaaattttaacaagtttgagtgtgaaaagcatccatcccrttctatgccctggctacccatttcccctccctagaggcrgctgttattatcagtttctctgggtcctttttagaggtaatctttttgtatgcaactgtgcacatgtatgtttacacaaatggtagggtattgtatatatatacagttactgcagtatgcttatttgactttgctttattgcttttattttctgcctgacatatgttaatgtggccaaatagggcatttcccagacaatccttatagtttcattctgtgctactttaaatgctgttctccttccctgaaatgtcctttttttttttcttttctttttttttttttgagacagagtctcgctctgtcacccaggctggagtgcagtggcacaatctcagctcactgcaacctccacctccccggtttaagccattcccctgcctcagcttcccgagtagttgggactacaggcgcgtgccaccacgcccggatacttttttgtttgtttgttttagtagagacagggtttcactgtgttagccaggatcgcctcaatctcctgacctcctgatctgcctgcctcagcctcccaaagtgctgggattacagacgtgagccactgcgcctggctgtcctttcttttaatcttttcaaattctagccagttcatagcccacttgctctgtaaagctttttcagtgatctttcttttgtaccatgcagtcttttaaaaaatctacagttttattataagttgctaattatatttaataaatacctaaatggtagaaattgattcattttttaatctccgtagtgccaggaactgtggctcatgtctgtaatccctgcactttgggaggctaaggcgggaggatcgcttaaggccaggagcttgagcccagcctgtggaacatattgagaccccgtctctacaaaaaataaattagctgggcatagtggtgtctgtatgtagtgtcaactactcaggagactgaggcagaaggataacttgagctcagggagttgaggccacagtgagccatgatggtgccactgtacttcagcctgggtgacagagcaagaccaagaccgataattatctccatggtatttgttttggacgtattagatattcagtaaatattttctggtgatgatagtgatatctaactacctcaggttacctaacctgaataaggcctatttttaacatagccattcacttgttaatttctgttattttcgtgacttcatttttactaattatattttaaaagataattttatataaatgcaaaaactttttatcatgtaacaatctggtaacaccttgagtaatttgtcatttcacatgcacattttatttgttcattatcttttttctttttgtttattttttctgttttttaccttctctgttgcatagagaagatgcaaccagttttgccattttccaagtcacaaacggacgtctataatgacagtactaacttggcatgccgcaatggacatctccagtcaggtgggtttaggttaactaacataaaataataaagcttgcatgcaaagtaagagtcttacttaacctgataatgttgatttgattttataatggtaggtttaattgttcatgctttcacagggctgtgttgaaaatatagtacctttatcatcatagtatataaacatgcaacaaatcaggtatagtcattctaaacttgctttatttgcatattttgcaacctctggtttttcagattataaaatatgaaggtatacattcccgtaagtgattaaaataatctttttttctgttgtggcttttgtgtttttatatggatagctatactgatttttttcatgaaatagtgttttctaagacacattttaattttttatgtatcaatttttattgcatatcaattttcatttatagtatatgtgaatgtcttatagtacttgatagaagaaatttgaaacttcacatagtgaggagaaacattacagtattatttgctatggattaactctatccttcataaacttttggatatcaacttctacagaagattaaatgtctttctgttttgttttctttgggtaggggactctccatttcttaggttctctgacatctgagctagctttttgtttaattaaaactttttttttagttgacagataatgtacctgttcatggggtacacagtgatgttttgatacatatagtatatggtgattagatcaaggtaattatcatttccatcatcccaaacatttatcattccttgtgttggaaacattcagtattttccttctagcatttgaaatgatataatatattatattgttacctataatcatcctgcagtgatgtagaacaatggagcttactctttctatctagctatacctttgtatcctttccctacccttttcagcctctagtatcctctgttctactttttatttctatgagattaactttttaaaaataatattctgtgtgtatatataccacattttctttattcattcgtctgttcttggacacctaggttgattctgtatcttggctgttgtgaatagtgctgcagtaaacatggggtgtagatgtctgttcgatatgatgattttctttcctttggataaattcccaatagtgggattggtgggtcatatggtagttctgtttgtagtttttgaggaacctccatactcttctccatagtagctgtactagtttagattcccaaaagtagcgtataagagttcactttctacacatcctcaccagcatttggtactttttttgtctttttgataatagccatcctaactggggtaagataccttgttgtggttttgatttgcatttccctcataattaaygatgttgagcattttttcatatctttgtttttgacggtccagctagttttattggttactttttttttttttttttagcaatartttcatgtgcagggctcaaattatatttaatattacttttttcaaattataccagaacaaccttaggttaggctataaaacaactgccttctttttcttttggcataataattatatatatatttttaattacactttacgttctagggtgcatgtgcacaacatgcaggtttgttacatatgtatacaagtgccatgttggtgtgccgcacccattaacttgtcatttacattaggtatatctcctaatgctacccctcccctctcccctcaccccacgacaggccccattgtgtgatgttccccaccctgtgtccaagtgttctcattgttcagttcccatctgtgagtgagaacatacggtgtttggttttctgtccttgcgatagtttgctcagaatgatggtttccagcttcatccatgtccctacaaaggacatgaactcatcctttttgatggctgcttagtattccatggtgtatatgtgccatattttcttagtccagtctatcattgatggacatttgcattgattccaagtctttgctattgtgaatagtgccacagtaaacatacatgtgcatgtgtctttatagcagcatgatttataatcctttgggtatatacccagtaatgggatggctgggtcaaatggtatttctagttctagatccttgaggaatcgccacactgtcttccacaatggttgaactagtttacgttcccatcaayagtgtaaaagtgttcctgtttctccacatcctctccagcacctgttgtttcctgagtttttaatgatcgccattctaactggtgtgagayggtatctcattgtggttttgatttgcatttctctgatggccagtgatgatgagcattttttcatgtgtcttttggctgcataaatgtcttcttttgagaagcatctgttcatatmctttgcccactttttgatggggttgtttgatttttttcttgtaaatttttttaagttctttgtagattctggatatcagccctttgtcagatgggtagattgcaaaaattttctcccattctataggttgcctgttcactctgatggtagtttcttttgctgtgcagaaactctttagtttaattagatcccatttgtcaattttggcttttgttgccattgcttttggtgttttaggcatgaagtccttgcccatgccagtgcccatgccagtgtcctgaatggtattgcctagattttcttctagggtttttatagttttagaactaacatttaagtctttaatccatcttgaattaatttttgtataaggtgtaaggaagggatccagtttcagctttgtacgtttggctagccagttttcccagcaccatttattaaataggaaatcctttccccatttattgtttttgtcaggtttgtcaaagatcacatggttgtagatgtgtggtattatttctgagggctctgttctgttccattggtctatatctctgttttggtatcagtaccatgctgttttgattactgtaccttcgtagtatagtttgaagtcaggtagcacgatgcctccagctttgttcttttggcttaggattgtcttggcaatgcaggctcttttttggttccatatgaactttaaagtagttttttccaattctgtgaagaaagtcatttgtagcttgatggggatggcattgaatctataaattaccttgggcagtgtggccattttcatgatattgattcttcctatccataagcatggaatgttcttccatttgtctgtgtcctcttttatttcattgagcagtggtttgtagttctccttgaagaggtccttcacatcccttgtaagttggattcctaggtattttattctctttgaagcaattgtgaatgggagttcactcatgatttggctgtttgtctgttattggtgtataggaatgcttgtgatttttgcacattgattttgtatcctgagactttgctgaagttgcttatcagcttaaggagattttgggctgagatgatggggttttctaaatatacaatcatgtcatctccaaacagggacaatttgactttcttttcctaattggataccctttatttctttctcctgcctgattgccctggccagaacttccaacactatgttgaacaggagtggtgagagagggcatccctgtcttgtgctagctttcaaagggaatgcttccagtttttgcccattcagtatgatattggctgtgggtttgtcataaatagctcttattattttgagatacatcccatcaatacctagtttattgagagtttttagcatgaagggctrttgaattttgtcaaaggccttttctgcatctattgagataatcatgtggtttttgtctttggttctgtttatatgatggattacgtttattgatttgcatatgttgaaccagccttgcatcccagggatgaagccaacttgattgcgttggataagctttttgatgtgctgctggattcggtttgccagtattttattgaggatttttgcgttgatgttcatcagggatattggtctaaaattctctttgttgtgtctctgccaggctttggtatcaggatgatgctggcctcataaaatgagttagggaggattccctctttttctattgattggaatcatttcagaaggaatggtaccagctcctctttgtacctctggtagaattcagctgtgaatccatctggtcctggactttttttggttagtaggctattaattattgcctcaatttcagagcctgttattggtctattcagggattcagcttcttcctggtttagccttgggaggctgtatgtgtccagggatttatccatttcttctagattttctagtttatttgagtagaggtgtttatagtattctctgatggtagtttgcatttctgtggaatcggtggtgatatcccctttatcatttcttattgcatctatttgattcttctctcttttcttctttattagtcttggtagcagtctatcagttttgttgatcttttcaaaaaaccagctcctggattcattgattttttgaaaggttttttgtgtctctatctccttcatttctgctctgatcttagttatttcttgccttctgctagcttttgaaggtgtttgctcttgcttctctagttcttttaatggtgatgttagggtgtcaattttagatctttcctgttttctcttgtgggcatttagtgctataaatttccctctacacactactttaaatgtgtcccaaagattctgatatgttgtgtctttgttctcgttggtttcaaagaacatctttatttctgccttcattttcttatatacccagtagtcattcaggagcaggttgttcagtttccatgtagttgtgtggttttgcgtgagtttcttaatcctgagttctagtttgattgcactgtggcctgagagacagtttgttgtaatttctgttcttttacatttgctgaggagtgctttagttccaactatgtggtcaattttggaataggtgtggtgtggtgctgagaagaatgtatattctgttgatttggggtttagagttctgtagatgtctattaggtccacttggtgcagagctgagttcagttcctggatctgtcttgttgatctgtctaatattgacagtggggtgttgaagtctcccagtattattgtgtgggagtctaagtctctttgtaggtctctagggacttgctttatgaatctgggtgctcctgtattgggtgcatatatatttaggatagttagctcttcttgttgaattgatccctttagcattatatgatggccttctttgtctcttttgatctttgttggtttaaagtctgttttatcagagagttggattgcaaaccctgctttttttgttttccatttgcttggtagatcttcctccatccctttattttgagcctatgtgtgtctctgcacgtgagatgggtttcctgaatacagcacactgatgggtcttgactcgttatccaatttgccagtctgtgtcttttaattggagcatttagcccatttccatttaaggttaatattgttatgtttgaatttgatcctgtcattatgatgttagctggttattttgctcgttagttgatgcagtttcttcctagcctcgatggtctttacaatttggcatgtttttgcagtggcttgtaccggttgttcatttccatgttyagtgcttccttcaggagctcctgtaaggcaggcctggtagttacaaaatctgtcagcatttgcttgtctttaaaggattttatttctccttcacttatgaagcttagtttggctggatatgaaactctgggttgaaaattctttcctttaagaatgttgaatattggcccccactctcttctggtttttagagtttctgccaagagatcagctgttagtctgatgggcttccctttgtgggtaacccgacctttctctctggctgcccttaacattttttcctacatttcaactttggtgaatctgacaattatgtgtcttggagttgctcttcttgagtagtatctttgtggcattctctgtatttcctgaatttgaatgttggcctgccttgctaggttggggaacttctcctggataatatcctgcagagtgttttccaacttggttccattctccccgtcactttcaggtacacccgtcagacatagatttggtcttttcacatagtcctatatttcttggaggttctgttcrtttccttttactcttttttctctaaacttctcttctggcttcatttcattcatttgatcttcaatcactgataccctttcttccacttgatcgaatcrgctactgaagctcatgcatgcatcacgtagttttcgtgccatggttttcagctccatcaggccatttaaggtcttctccatgctgtttattctagttagccatttgtctaatcttttttcaaggtttttagcttctttgcaatggtttcgaacatcctcctttagctcggagaactttgttattacccatcgtctgaggcctacttctgtcagcttgtcaaagtctttctctgtctagctttgttccgttgctggtgaggagctgtgttcctttggaggagaagaggcgctctgaattttagaattttcagcttttctgctctggtttctccccatctttgtggctttatctacctttggtctttgatgatggtgacgtacagatggggttttggtgtggatgtcctttctgtttgttaattttccttctaacactcaggaccctcagctgcaggtctgttggagtttgctggaggtccactccagaccctgtttgcctgggtatcaccagcggaggctgcagaacagcaaatgttgcagaacgacaaatgttgctgtctgatccttcctytggaaccttcgtctgacaggggtacccaggtatatgaggcgtcagtcagcccgtatggggaggtgtctcccagttaggctacttggggatcagggacccacttgaggaggcagtctgtccgttcgccgatctcaaactccatgctgggagaactactactctctttagagctgtcagacagggacctttaagtctgtagaagttactgctgccttttgttcagctatcccatgtccccagaggtggagtctacagaggcagtcaggcctccttgagctgtggtggactccacccagttcaagcttcctagctgctttgtttacccactcaagcctcagcaatggcagatgcccccgcctccagcctctttgccgccttgcagttcgatctcagactgctgtgctagcagtgagcgaggttccgttggcatgggaccctctgagccaggcatgggatataatctcctggtgtgccgtttgctaagaccattggaaaagcccagtattagggtgggagtctccctattttccaggtaccatatgtcacggcttcccttggctaggagagggaattccccaaccccttgcgcttcccaggtgaggcaataccccgcccttcagctcacrctatgtgggctgcacccactgtctgacaatccccagtgagatgaacccagttcctcagttggaaatgcagaaatcagctgtcttctgtgtcgctcacactgggagctgcagactggagctgttcctatttggccatcttggaaccctgccttcttcattcatatgtaatacaaaacttctaaggttttagtggagaagagatagagtaaaaggatttctatagacagaagaaacagttggtcatcaactctttcccttgtggcttcacatctcccctaaggacttcttatgttggtttggtcttacagtatagtcagtggcagtttccctcttcccattccttcctctgtctgatttaaaatgctgtttcaagtatcgatataagtattttgcctgtttcttttagcgtggctgtgaagggctgacattttcagaaggcacttactgaaaaaaaaaaaacaaagaaatgtaagagtccatcacatataaatagttaagtttctaaaatatgtatttgagatcccagtaattctactaggataaatagcaaaaattctccagccctgaagagttggtctgtctttcctttccttgttatcttgattctcttttatttcatttcacatgctagaccccatcatgttttcctgctgcattccccactccaccctccaaagcaatgttctcttcctgcaacctgtttgaaaaaattgaactttgtcttatttcatatccctagtacaagttgaatatccctaatatgaaatctgaaatccaaaatgctctaaaattcgactcttttttttttgagatgaagtcttcctctgtcactcaggctggagtgcggtggcgcaatcttggctcactgcaacctccgcagcctcccctaaccccatccctgtgggttcaagcgattctcccacttcatcctcccaagtagctgggactacaggcacctgccaccacacccaactaattttttgtatttttagtagagatgaggtttcaccatgttggtcaagctagtctgagactcctgaccttaagtgatccacctgccctggcctcccaaagtgttgggattacagtcatgagccactgtgcctagccaaatatccaaaacttyttgagcgctgacatgatgctcaaaggaaatactggagtattttgcattttggatttttgggttaaggatgctgaaccagtaagtataatgtaaacattgcaaaatgcaaaaaaatgtaaaaaccctaagcagttctggtcccaagcatttcgcataagggatactcaacccataatcttttcttttctgttttctggttggaagggcatattggctttatagctaatttacacagcattgatgtttaatacacagtgagtccaagtagatcactcagacctattagtagtttattagtgtcactcacttctggaacattctgtgatgttttacttggatgagttctttcacctctcttgggaaatagtcataccaaagtctgcttattactacaatgtgttatctattatacattgtccaattttctactcaaaattactagacaggcaaagaaaaagtaaagtataacccttactcaagaaaaaaaagcaatcagtagaaactgtgagtgggcccagatattggatttagcagacaaagacttcaaagcagctattataatatgtttaaagaattgaaagaaaatatggtatcagttaaacaggaaatctaagtagatgatataaactagacaataaaaataatattctaaagttgaaaagtgtagttactgaaattaaaaatttacagacaacagcctcaacagcagattagagatagcaaaagaaagattcagtgactttgaatgcaggtctgtagaaattactaaattgatgactctcacgtagcaactttcacccgtagtttggtttcatatacaatgctttaactctttttgctattttttctcttactttctgtgatggaaacattttgtgctttgattttaatgggtgtatcacagttatatacatctttacaaactcatcaaattgtatactttatttatatatttatttttttttgagatagggtctgactctttctcccaggctggagtacagctgaaattagttgggactacaggtgggcaccactgtgccagctaatttttgtattttttgtagagatggggtttccccatgttggccagtctggtctcaaactcctgggctcaatcatttctgccgcctcagactcccagagtgttgggattataggtgtgagctactgtgcctggctggtatagctttttttttttttttttttttttttgtgacagagtctcactctgtcgcccagggtggagtgcagtggcgcgatctgggctcactgcaacctctgcctcccgggttcaacccattctcctgcctcagcctcctgagtagctgggactacagatgcgtgccaccatacccagctgatttttgtattcttagtagaaacagagtttcaccatgttggccaggatgatctcgatctcctgacctcgatccacctgccttggcctcccacagtgctggcattacaggcctgagccaccatgcctggctgttggtatactttaaatggatgtaattcattgcagattatacctcagtaaatttttatttagtttttgagactgagttgctctgttgcccaggctggagtgcagtggcacgatttcagctcactgcaacctctgcctcctgggtttaagcgattttcctgtctcagcctccccggtagctggaattagaggtgtgtgccaccatgatcagattatttttgtgtttttagtaaagatggggtttcaccatgttggccaggctggtctcgaactcctgacttcaggtgatccacccgcctcggcctctcaaagtgctgggattacaggtgtgagccaccacgcctggccttaatttttaaatactgtaaggcttataaagaaaagaatattccccttctgtttctttcctctcacgtagcaaccttcacccctagtttggtttcatatacagtgttttaactctttttgctatttttttctcttactttctactatatttccaaatacaatgcttctataatgattccttttttttttctatcagtttttgataatcattgactccttatggtcaaagaagacttaattcccttctgtcactcttcatatattaatataactaatatatatattgtttagttttgatataactaaaaataactatatgtatatataactatatatgtataagctatctgtatatagttatatatgtatatgcacatacatatatagttacatatgtatacacacatacatatatagttacatatgtatatgcatatacatatatagttacatatctatatgcatatacatatatagttacatatgtatatgcatacacatatatagttacatatgtatatgcatatacatatatagttacatatgtatatgtatatgtatatacatatatagttatatatgtattagttatatcaaaataactatgtatatatagctgtaaatgtatatataaactatatgtatacagttatatatgtatttgtatatgtgtgtatacatatatagttttttttgttttttttttttgttttttttgtttttttttggagatggagtcttgccctgtcccccaggctggaatgcagtggtgctatcttggcttaccgcaacctctgcttcccaggttcaagcaattctcctgcttcagtctcccgagtacctgggattacaggcacgtggcaccacgccaggctaattttttgtatctttagtagaaatggggtttcaccatgttggccaggctgttctcaaactcctgacctcgtgatccacccgcctcggcctcccaaagtgctgggattacaggcgtgagccaccgcgcctggtccctatacatatatagttatatatacctatagttatttttagttatatcaaaataactatatgtatatgtaactatatatatagtatatatagtatatatatactatatagtgtgtatatatagtatatatatagtgtatatatcgtatatacactatatactatatagtgtatatatagtatatgtagtatatatagtatatatagkatagtatatatagtatatatagtgtatatatactgtatatatagtgtacatagtatactatatagtatacatatagtacactatatagtatatatagtatagtatatatagtatacatagtatactatatatagtatagtatacayagtatactatatagtatatagagtatatatacagtatactatatagtgtgtatagagtatatatacagtatactatatagtgtgtatagagtatatatacagtatactatatagtgtgtatagagtatatatacagtatactatatmgtgtgtatagagtatatatacagtatactatatcgtgtgtatagagtatatatacagtatactatatcgtgtgtatagagtatatatacagtatactatatcgtgtgtatagagtatatatacagtatactatatcgtgtgtatagagtatatatacagtatactatatmgtgtgtatagagtatatatacagtatactatatagtgtgtatagagtatatatacagtatactatatagtgtgtatagagtatatatacagtatactatatagtgtgtatagagtatatatacagtatactatatagtgtgtatagmrtatatatacagtatactatatagtgtgtatagmgtatatatacagtatactrtatagtgtgtatagagtatatatagtatactgtatagcgtatagagtatatatatagtatactgtatagtgtatagagtatatatatagtatactgtatagtrtatagagtatatatagttacatatacatatagttatttttagtaatatcaaaaaaccatagctaagatttttatgatttagcaaaatattgtttaccccaaagccacgtattatatattaatgatattttttccyttttgagtttttcttccccacrggttttctgatctttttttttgttctctaactttatattataggtatatactcttttctctgtttaatttgctttttaactagaagacctcctttagtagttcttttagtgaatatctgtggttaaactcttagtctttccagtgtctgaaataccctcattttaatgtgacaggtcacttttctcacctcaacattttggacatacctcatttccaacaaacatttgttacttctgatagagagtctgctgtcattctcatacttgttccttgtggaaatgtctatatataaagtctcagaactatatatttttaatatatatacatatwtttatttatttaaaaatgtataattaagttagtagtagtagtagtagtagtagtagtagtagtagtagtagtttttttttttttagatggagcctccatctcccgggttcaagtgattctcctgcctcagcctcctgagtagctgggattacaggsacacaccaccatgcctggctaatttttgtattttgagtggagatggggtttcaccatgttggccaggctgatcttaaactcctgacctcagatggaccacctgctttggcctcccaaagcgctaggattacaggcatgaaccactgcgtctggccttaagttattattgactattgatgccctgttgctctatcaagtagtaggtcttatttattctagaacctygttttaaggtatcctgaatgtggcttttttttttttttttcctaagacggagtctcactctgttgcccaggctggagtgcaatggagtgatcttggctcaccgcaatctctgcctccttggttcaagcaattctcctgcctcagcctcctgagtagctgagattacaggcgcacgccaccacacctggctaatttttgtgtttttagtagagacggggtttcaccacattggtcaggcttgtctcaaactcctgaccttgtgatccgcccaccttggcctccgaaagttctgggattacaggcgtaagccaccacgcccagcctaatgtggattttgtttttttttttaacttgaattttatttatacttcctgattttataatagttaacttgtagtaaaagtaaactggttgtctaaataaataagctgatttcctatactagtttagagtctttagttttcttaaaccgtattaagagatttgattacaaaagtaaaattgaggcttttgtctttttttttggccactctaatttgctgactgacttaacatttgtcttcacagtaaacattgtaaataaacactgatgtttgttgcgtagtatgtaaaaatattatttaggagtggtgagatttaaacatttacaaacctgtaatatatatagtacagcaacactggacaaataaccttttcaacttaatcagaggtgttctataaatgttcatttgcatatatacagcccatataatacttagcatatgtaaaagcacatctttatactctttcaattaaaattgattattattattwttttttttttgagacagagtccctctcagtcacccaggctggattgcagtggtgtgatcagggctcactgcaatcgggtagctggaactacagggatgtgccaccacgcccagctatttttgtatttttagtggagatggggtttcaccatgttggccaggctggtcttgaactccatacctcaggtgatctgcccgcctcagcctcccaaaatgctgggatwacaggcgtgagstactgcacccggcctaaaattgattagtttttaagaccctcttggtgggaacagactttcatagtgtttatagttataatagtttggaatcaaagtagtcgagtgctacttttttttcctctgtacatcctatccctaatgcctttactatattttgtttcttatttgagagctttatttgcttcataactttttttttttttttttttttttgagacagagtttcactctgtcacccaggctggagtgcagtagtgcaatctcggcttactgcaacctccgcctcctgagttcaagtgattctcctgcctcagcctccgaagtagctgggattataggcccccaccaccacgtctgactgattttttgtatttttagcagagacgaggtttcaccatgttggccagcctggtcttgaactactgacatcaggtgatccgtccacctcgatctcccaaagtgctgggattacaggygtgagccatcgcgcccggcgcttcataacctttttrtattgtytttctgttccccaaaatgaagtagtttcttcttaaaaatactgttttttgtttttttgtttttttttttatttgagatggagtctctctctgtcgccaggctggagtgcagtggcacgatctcggctcacttcaacctctgactccgtggttcaagcaattctcctgcctcagcctcccaggtagctgggattacaggcacaaatactgtttttaataagaaaattagaatagggacaggcacaatggctcactcttgtaatcccagcactttgggaggccaaggtgggaggattgcctgagcccaggagttcgagaccagcctaggcaacatagtgagtgagaccctgtttctataaaaaaaatttttaattagtccggtctggtggtgcacaactgatgtcccagctacttgggagtttgaggtgggaggatggatcacttgagcccaggaagattaaggccacaatgagctgtgatcatgccactgcactccagcccaggccacaggtttcaaaaaaagagaaaattagaattatacgttagggggaaaaaacctaataaccatattcctatctacctagtgaccacccctatgaagatcctggtacatgttctcattgaaatcttattttgaaatatttttgaattaaaaaaatatattattaccttggttttacaaatgtttgcttgtctttatgttcagctacaattttctaatcacaatggttttactttttccttgtcagaaagtggagctgttccaaaaagaaaagaccccttaacacacactagtaattsactgcctcgttsawaaacagttatgaaaactggatctgcaggcctttmaggccaccatagagcacctagttasagtggtttatccatggtttctggagtgaaacagggatctggtcctgctcctaccactcataaggtattctgggacagtaactttaattgctgtctttttgcaaatagaaaaatttttaagatactattcctgcttaagttgatcataagtactttataatactttagagaatggataagtttccataaagttaaatttttttttttttttttttgagactcttgttttccaggctggagtgcaatggcgcgatctcggctcattgcaacctccgcctcccaggttcaagcgattctcctgcctcagcctcccaagtagctgggattacaggcatgcaccaccacgtygagctaattttgtatttttagtagagacggggtttctccatgttggtcaggctggtctcaaactcccgacctcaggtgatccgcctgcctcagcctcccaaagtactgggattacaggcgtgagccaccgtgcccaaagttaatttttttttaaatccacagggcaacttgctataaaactttttttggacctcattagacatttaataccaagttttgcttacccagtctgttttatataatgctgtatatttcattttaaatttatttttaaaattatttcaatctttgtaaatgttttataccagtaacatacctagagttttgtcatgattctaacaagggttaaaatttgtttttattttgtaaaaactaaatctctggataaaatcctctataactgacttaatgccaaatatagttctctagtgaatacagttttaccttcaggtaaataaatatacaatttatggatttttataccctttttcctatttttaaagcttgaattctgtgaactttaaggttaacttatttatgaaaagtgtaaatgttaggttgtattttcatattaaaattttgtatcctttaagggtactccgaaaacaaataggacaaataaaccttctacccctacaactgctactcgtaagaaaaaagacttgaagaattttaggaatgtggacagcaaccttgctaaccttataatgaatgaaattgtggacaagtaagttttgccatctaaatgttttattttatagtttttatattttaattttacttataaaacatgtcaggagtgaaatagataataaataccttgtctggtttacatacttaatttttatgatagttttcaattataaatgtagaaaaccattgctttactgatttaactatagtttaacagttaacattaaaaataactatatgtcatagggcttaggcttcatcttgtaataactgggccctgtttgtatcgtagaactaactgaggtcttgtttcttagtggaacagctgttaaatttgatgatatagctggtcaagacttggcaaaacaagcattgcaagaaattgttattcttccttctctgaggcctgaggtaagaactttatattatcatttttctataataccatctgttactgaatccatagtagtagtagtagtaaagaaatatttgagctatactaaaataattaattcatataaggtaacartagatttartgttttaaaaaagataaaacattaacaattgatgttgagaagttattatagaataggaaaatggatatgagttcctaatttccaatccttttatatttttaggaaaagtgggtagtatgatataattttgttttgttttggagacggagtctcactcattgtgtcgcccaggctggagtgcagtggcatgatcttagctcactgcaacctctgcgtcccagaattcaagtgattctcctgcctcagcctcccaagtagctgggattacaggcatgtgccactatgcccagctaatttttgtaattttagtagagatggggttttgctatattggccaggctggtctttcatacctgatgtcaagttatccacccatttcggcctcccagagtgttaggattacaagtgtgagtcactacatctggccaaattttgatatcaaggtgagagagatttaaaattaagataaggtacaaaaattagcctagtgtgggggcgcacgcttgtagtcccaactactggggaggctgtggcaggagaattgcttgaaccaggaggcagaggttgcagtgagccaagatggcaccactgcactccatcctgggtgacagagcgagatgtcatctcaaaaacaaaacaggccgggtacggtagttcacgcctgtaatcccagcactttgggaggctgaggcgggcagatcacgaggtcaagagattgagaccatcctggctaatatggtgaaaccctgtctttactaaaattacaaaaattagctgggcttggtggtgtgtaaccccagctactcgggatgctgaggcaggagaatcgcttgaacccgggaggcggaggttgcagtgagccgagatcacgccactgcactccagcctggcgacagagcgagactccgtctcaaaaaaataaataaaaatttaaaaagataaatacataaaaataaataaataatattaagagaaggaaatcaggcaggtagtggcccctgacacaatgagttttcccagaattggattgcttggaaatgccgctcaaagagtgtggtaaactccatcgaaggctaaataccaacgtgmcagtgataataaacaagtactttatgggaaagttttttttttaattatttttaaaaagagagaaattgtactggagaaaagaggaattcaggtagaataattctttttttttttttttttgagatggaattttgctcctgttacccaggctggagtgcagtggcttgatgttggctcactgcaacctctgcctttggggttcaagtgattctcatgcctcatcctcctgagtagctgggtctataggcatgcaccccaacacctggctaatttttgtgtttttagtagagatagggttttaccattttggccaggctggtctcaaactcctggcttcagatgatccgcccaccttggcttcccaaagtgctgggattacaggcagaggccmctgtgcctggcatgaagaacaatttttaaaagaatgacttttaaggatattaagtcatcaaagtagatagagccattaaatgatgggtagaaacctaatcttccatcccatattttatgacttattaaggaagataggcaatcttgcagttgataataaatatttggctttccatacttagcaccgttttgaatttttccagttcacagatggtatatttagtgctgttccaataatattgcaaaaaataaatctgaagactcacttctgggtcacagwtatttcactattaacattaaaatcttacggacctacctgcaacatgtagtggaaataagttgtgtggcacgttgtggtgggtgcattattaaataaatgtgcaaaggttttatggctgtctcaatttttccatagtcttgagtcattcacatactgcctttatggtgtttatcacttgtaagtgagtaccaactgtactagaacttactgaatatttttcaagtctattttacttattactcattctaagtacataaaatcactggtctgatatgcaagttaggttttcgctaatacccagtaaaataattagataattattaaaatagaaagcatttgtcattatgtgaactggatttatgtcatgtaccacctcaggtcacactttgggaaacgtagcttacgtattgagctaacattttgctggagttatataagattagtaaatgctatagactaaatattgaaaaaaaagcttgcttaaagaggatttacataattrtagwcctgaaaaggatcttagcagtcttckgatcgattcattgataaagaaactagtcctaagagctaaaatgacttgctcaagattttagttaagtggtagacctaggaaatacctttctaagattagagctgcctggttagtgctatagctgccacctaattcttacatttatttattaagggacatgctttttacggtagaaaaatatatctaaaattgtgaaggtaataccaaggaaatatttaggctatgcaagaaaagtcattcagcttttgctttacccaggcctatagagaacatatctaaaataataagtaacatgtgaatttgaatttaggcatattttcatggtagtgacataatgtgcaattaagaagctataataatgtaaaaatgccagttgcaagttatttcaaataaagttgaataacctgacctcaggaggggcagaaaccttagtaaacttagcaaactgagacctaaggaagagcaagatctgtggtagagccaggtctaaaggtttatatcctggtacaaacttgtctatacatcaccacacctgccaaatggaactttttttccttgtagttcagatttccaagaaagggaatattattgtcctagctcagcgtttcacaatagactcacaaaatgaatcttgttaagcctatgaatgggtaagacttatcccataacacgcctctattgtgtaaaaaaatcagctttattcctaattccctgtagtaggaagcttgcatagaccacaatagagacattgttagattatatcaagaaggtgagtggcaggcattcttgagtatactggaatttttatttcattgtagaaacacagaatcataattagtcatctaaaactggttttaaggagataatactaaagatactcacttgaggtagattgttctcagaattacttaaaataagtgctttaaatcttgctcattcatgaagccatagccctggaaggagatattgaaaaacttctccatcttccttcaatcccataggaccatgtttttaattgtagtttaacattaaacataatttttgaaagtagccaatattaatctttgacaaaaaactcaaactaaatagcagaaaatagaacatgccctctcctctcgcccaaaagtaagactacattttaaagtatatcacagtgatctgtctaaatatttttctcaaatattttactaagaaagcgtatattcttctgtccttatttcatagatctcttctgtatcctgtgcagcttgtctatcatttcgagcttttatatttcttattttgttctcttgctgcttaaatgtgattctttgagatttatagaagaatgtgattgttctccagttttaaaaagctcttctctatctactaaaatttccatgaatttctttctttctttttttttttttgattgagacagtctcgctgtgttctccagcgtggccttaggcttaagtgatcctcctgtctcagcctcccaagtagctgagattacagaaatttccatgaatttccaaatatgatgttatctttcatataagcttaaacataagcctttcttctttcaaaaatgttagaacttacctctttaaataatcttataaagccatttcttaatttttgtttccttttcgaatctattaacttgcatatcatagtaaatgaacccttagctccatcataccacacaccttctactcctgtcctcccactttttctcacccaggctggagtacagtgaatatttagtgcttttaaatattattcattaccaagccaagtagcgtactattttttccttgtacagcctttttttcccctaaataattgtgttattttttcatttgcttcattttcatcttatcgattgataattcttctgttccatttcagtctaatttccacatggccaaaccaatctaaaaacctgttaactcaggtctttttttttttttttttttcccagaataccttttcctggaaccaccttcttcttttcattcgagaccaaatgctttccatgcctgtgtcaaagtggttgttctctaatctgtcttcactaccatcataatttccttttccttttttcctttctttattatgtatctcctgtcttttaaattccatattttccactttcatgatttattttctcattttgatggctacatctttcagtaactgagaaaaggttgtgtgagggaatattttgagatgctgtagttttgaaaatatctttattctgctgtcttctcattaataatttgactggatgtcaagatttaagttggaaactattttccatgagtattttgaaggcattatctattgtcttctagcttccagtgctgctttgtattagagacagaagatcaggaatcaggatagcattggacttcttatttctatttcccaaagctttttggatcttctctttattcttatcttctgatattttataatgatatgcttgatgcatttactttttcttttcttcttccctcttgtacatttctttctttttttaggtgggggcaggggggaaggagtctcactcttctcacccaggctagagtgcagtggtgcaacctcagctcactgcaacctccacctctggggttcaagcgattctcctgcctcagcctcccgagtagctgggattacaggcatctgccaccacgcccagctaatttttgtatttttagtagagacggggtttcaggctggtcttgaactcctgacctcaggtgatccgccctcctcagcctcccaaagtgctgggattagaggcatgrgccactgcgcccagcccctcttggacctttctagatattcatccttcaattctgagaaaggttctataattctttaatttaaaaaaagtttttttgtttcatctttctcactttttttttttttttttttttttaagacacagtcttgctctgtcacccaggctggagtgcagtggtgcgatctcagctcactgcgcccttcgcctcctgggttcgagtgattctcctgcctcagcctcccaagcagctgggattacaggtgcccaccaccaccatgcccggctaattgttgtatttttagtagagacggagtttcaccatgttggccaggctggtttcaaactcctgacctcaggtgatccacctgctttggcctcccagagtgctgggattacaggcatgagccaccgtgcccagccctattctgatttcatagatgcagtgtcttttatgtctctgagaggttttgtcaagttttcttttgtttactttattatctgtttcttcaagattcctcctcttttctttttgccttaagctttttcatattggaagcttctctcaaatgtctggttattctggttgtccacttatattacgtggaacaataaaaaagttgattaggactctgtgctgtaagtaagtaaattgttgatagtgagagcccattaatcacaggatgatcaagcagcaagcctactgtttatttgggtttctccaaatggctatagctgtcagtcttttttttctggggttatttggcttctctagaaaagaattttctagtctcttgtttggagaatacaagcttgactattggtgttccagaaaatgggtgggaggagacgactttgttttctgttaggttgagccatgtgaaattactaggttttgttttgttttctgttttgttttgagacagagtctcactctgttgcccaggctggagtgccttagcatgatcttggctcactgcaacctctgcctcccaggttcaagcaattctcatgcytcagcctcccaagtagctgggattataggcatgcaccaccacgcctggctaatttttgtatttttagtagagacggggttttgccatgttgaccagtctagtctcgaactcctgacctcaggtgatccacctgccttggcctcccaaagtgctgggattacaggtatgagccaccacacctgggctgaaattactgtttttataggtcaaaaacagttgagggataggcatggtggctcccacctataatcccagcactttcagaggccaaggcaggaagattgcttgagtccaggagttcgacaccagcctgggcaatgtagtgaaaccccatctatatttaaaaaaaaaaaatagatgaatatctttgtttgcagataacatgattgcatatgtagaaaatcccaaagaaccaacaaaaagagctcctagaactaataagtgattatgacaaggtgtagaatacaaagttaatatacaaagtcaattgcttttttatctaccagcagtgaacaactggaatttgaaattaaaacacaatactgctgggtgcagtggctcacacctgtaatcccagcactttgggaggccgaggtgggcagatcacctgatgtcaggggttcaagaccagcctgaccaatatggtgaaaccccatctctactaaaaatacaaaaatyagctgggcatggtggcgggtgcctgtaatctcagctactcaggaggctgaggcaggagaatcgcttgaacccaggaggcagaggttgcagtgagccaagatcgcgccattgcactccagcctgggggacagagcaagactccgtctcaaaaaaaaaaacacaatacctttcatattaacactaataaaatgaaatatgtgtagttctaacaaagtttgttgtagaagatctatatgagaagaattatagcactcatgaaagaaatcaaagatctaagtaaactgagagatattccatgtaaatggacagggagactaaatattattgagatgtcagttcttcccaagttcatatatcgattcagtgcagtcccagtcaaaccccagccagttattttgtggatactggcaaactaaagtttatatgaaaaggcaaaagacctagaacagccaacacagtattgaagaagaaaaaagtcagaggactgaaactacccaatttcaagacttactgtaaagctacattaatcaagacagcatgtcattggcaaaagaatagacaaataaatcagtagaattggacagagagcctagaaatcaacccacacagataaagtcaactgatctttggcaaagggacaaagacaattcagtggagaaaagatagccttttcaacaaatggtataggacaactggacatccacatgcaaaaaagttaatctagacacagacctgacaactttcacaaaaataaatggatcatagacctaaatgtaacatgcgaactgaaacttctagaggataacataggagaaaatctaggataacatgagaaaaatttttggtttggcagtgacttcttaggtacaataccaaaacatgatccttgaaaaaaaaaatcagtatgttgaactttgtttaaattataaacttctgctctgtgtaagatgctgttaggagaatgaaaagacatgcagcagagtgggagactttacaaaattcattatctgatgaaggaccagtatccaaaatatacaaagaacttttaaaactcaacaataagaaaatatacaacccagttaataaatgggcaaaatatctgaacagacacctcaccaaggaagatagatagatgacaacaagcatatgaatatatgctcaacatcatgtcgttagggaaattgcgcattaaaacaacaacaagataccctgccatccctattagaatggctgaaatctaaaacactgacaacaccaaattctggcagggatgtggagcagcagaaactttaattcattgctgatggaaatctaaaatggtagaaccattttggaaggtagttggacagttttttacagaactaaagacagtttgacagtttcttacaaaactcttaccatatggtccagcagtcttactccttagtatttacccaaataagtttaaaatgtacatccaataaaaaaaactgcacatgaatatttctagcagcattattcatagttgccaaaacttggaagcagtcaaggcatccataagtaggggaatggataaacagactttggtatatcatgtaatggagtattattcagcaataaaaagaaatgatctatcaagccacaaaaatayatggaggaaccataaatgcatattgctaaatgaaagaagccagtctgaagaggctacactataggattctgactatatgatgttttggaaaaggcaaaactatggaaacagtaaatagatcagtggttgccaagggagacagggagagatgaataggtggagcacagtggatttttaaggcagtgaaactgttctttatgataatccaatggtggatacatgtcattatacctttgtcaaaacccacagaatataaaacataagagtgaaccctaatgtaaaatatggacttcagttaataataatatatgaatattttttcattagttctaacaagtgtactacactaatacaagatattcagagtaggggaaattggaaaggaatgagaggttatatgggaactctgtactttctgctcaattttctgtaaacctaaaatcactaaaaaaaaagtttatttttatttttatttttttttaatttttaattttttgagatggagtttcactcttgttgcccrggctggaatacaatggcacgatctcggctcactgaaacctccgcctccagggttcaagcgattctcatgcctcaacctcccgagtagctgrgattacaggcatgtgccaccacgcccagctaattttgcagttttagtagagacagggtttctccatgttggtcaggctggtcttgaactcctgatctcaggggatctgcccgcctcggcctcccaaagtgctgtgattataggcgtgagccrctgcgcccagcaggtttttttttttaagttggatattagccatttcatatgattcaacttaaaagtacatacaccttcactgttattaaagtgtaggtgagatgttttcagtctggagctctacccttgattcctgccatgcctagtgtccctgaatctggagactctgacttatttctttagagaacgaaactcctgccttctgctttggtggtgattggtacctgcttgactgcctttggtggggagttcctcataccaactttcaatcagttcctgtgtttgtttgtttgtttgtttttgagacggagttttgctctgtcgcccgggttggagtgcagtggcgcaatcttggctcaatacacgctccgcctcccgggttcacgccattttcctgcctcagcctcctgagtagctgggacgacaggcrcccgccaccacgcccggctaatttttttgtatttttagtagagacggggtttcatcgtgttagccaggatggtctcgatctcctgacctcgtgatccgcccgccttggcctcccaaagtgctgggattacaggcgtgagccactgtaagccaccgtgcccggccagttcctctgtttttgactgcctgccttactactgctttctgtggtgcctgataacatccaattcctgaaccttcctgggatttttgttcacgtcagcgtgcttcttgcatttaggtatcccttcacaagtaggcatttaggttttaagctctgctaagtgatttaccacactttatcagttctccattttgtggaattcattgtgttaatctccttttctatttttgtttggaagattcatatattttttattcatttagtattttttggtgggatttctaagtagagaaacatgcctatgttcaatatgtcttgtttaagcagtctgctttcatttttaccaccgaggagttggttttatttctttttttttttttttttttttttttttttgagacagggtctcactttgtcagccaggctggagtacagtggcacaatcaaagctcactgcacccttggcctcccaagctcaagtgatcctcccacctcagcctcctgaatagctgggagctcaggtgatccagcacacccagctaattttttttttttttaattttttgtagaagcagagttcccctatgttgcccaagctggtcttgaactcttgggctcatgtaatcctcctgtctttgccccctaaagtctgggattacaggtgtgagccaccacacccagctgtttttaattattacattaatttatgattatgtgtttcctttaaagctatgggcagctctgtttgggaagatgctactgaaaaaaggatgctttttagatggcaaagagtacttaaaatgtctctagaatcatagttgtaaactaaagtatatattttttagttgttcacagggcttagagctcctgccagagggctgttactctttggtccacctgggaakgggargacaatgctggtaagggttctcttcaaatttgagttttctgttgagatatttgggataatatgaaaaaaagaaactttatcttgtccttgagtctattatttacgacttgctttttgctattgtacacttttgttttttttgtttgtttgttttgttttgttttgagtgatctgggctcaccgcaacctccgcctcctgggttcaagcgattttcatgcctcagcctcccaagtagctgggattacaggcacacgccaccacacctgtctaggttttttatttttggcagagacaggatttcgccatgttggccaggctggtgtcgaactcctgacctcaagcagtcctcctacctgggcctcctaaagtgatgggattacaggcatgagccactgcacctggctgatacacttttaagtttttcagctacttttcaatgtagaagtagatggaaaaccatgtacgttatcttcagtagtgtgtttttggttggttaaatttgacagtatgattgtcattattttttgtaaattaaatttttacctggaagagcttaccttactatattgagtatctttctaacccctgatttttgcttctactatcataataactttatttaagtaatcagtatgttatagcttttttttttttttaagtattcttttgccagaagtttttatcaggctctggatacctctttcctctgcatagtcctcctggatggaagaaacaaagagggaaagagtaacttttccttagatgtttgtctttctcaaagcagttatctttgtatatctaagaagagaggagaataacactgtctctctttttttttaaatctctctctactcattctctctcaggaggagagtagaaagaagcacagctcttcctataacctgtccttattactgagaaaggaacacattgattgccatgtattggggattgtattataccttacatttttatttttattttttattaatttttttttttagacagtcttactctatcacccaagctggagtgcagtgatgtgatctcggctcactaccatctcttccttctgggttcaagcaattctgccacgtcagcttccygagtagctgggattacaggcatgcgccaccacgcctgactaatttttgtatttttattagagatgggatttcaccatgttggccaggctggtctcaaactcttggcctcaagtgatgcgcctgcctcrgcctccgmaagtgctgggattacaggcatgagccaccacacctggcctcatagcttacatttttagagaatcttttctagtacttaaatcggtaaatatggttatcttttaaatgtaatatattgaactaatttaatatttgctcttgtgatttttaaaggctaaagcagtagctgcagaatcgaatgcaaccttctttaatataagtgctgcaagtttaacttcaaaatacgtgagtgctctgtttccaatattgtcgtattttaagttactgtctaaatgttactgtgttaactgtaaatggtaatatttcatgaaaatatttttctaggagcttatctattgtatctattatttacatatgatgaatatctatcttcagagtagaaagttatgtacatttgtgttgtcaaatactgtattagtttactggggccatgtaataaaataccgtaaactggctggcttaaacatcagcaatttattgtctcacagttgtggaaggtagaagtctaagatcagtcaaaatgttggcagggttgcttcctcctgagggctgtgagggaaaatgtatgttgtgtgcctctctcctggcttctggtggcttgctggcaatcttttgtattccttggcttgtagatgcatccctcctatctctgtctttatctttatgtggcattctccctgtrtctgtcaccatgtccaaatttcccctgtggattaggacccaccctaatgatctcaatttaagtttgtcatcagcaacaattctatgtccaaataatgtcacattcataggtactagggataggacttcaacacgtttttggagaacacagttcaacccattaacaaatactatcactttccacttaagcttcaagtaaagtggattttatctcaaggagccaccagataggaacacagatctgatggcataaactgagtatttctggccttctgattctgatctaaaatatgacagaagattttccctgttttaattttttttttttttttataatagagacacagtctcgctatgttgccaggctactttcaaattcctgggcttaagcaatcctcctgcctcggactctcaaagtgctggaattacaagtgtgagccaccacacctggccagtagattttccctgctttcttttgattgtttataattttgttttctttttccattcaccctctgctgaccctatagtattattcaaagaagtgttcagtytagttttggggtagggcaagcataactacagtgcttaaagagagtaatttgtctggtgtgcagaactagtgtgtaaatataactggtgcattgcaaaactgtgaagtagtttctgtcaaaccttacactgctttgtctttctccctctctccctttctcttggttgccccctccccctcccaatgataccttagtctctgcttgcctttatcaaaacctttatgattggccgggcacagtggcccatgcctataatcctagcattttgggaggctgaggcaggaagatcacctgagcccagaagttggagaccagcctaggcaacatggtgaaaccccatctcttccaaaaataaaaaatagagccaggtgtggtggcatgcacctgtagtcccagctactcaggaagctgaggygagaggatctcttgagcctgagaggttgaggctgcagtgaactgtgatcatgccactgcactccagcctgagtgacagtgtgagaccctgtctcaaagaaacaaaacaagggggggcatggtggctaactcctgtaatcccagtactttgggagactgaggcaggaggattgcttgaggccaggagttcaataccaccctgggcaacatagtgagacccccatctctacaaaaaataaaaaatttagctggacatgccagcgaatacgtggtcccagcaaatcaggaggctgaggtgggaggatcacttgagtcaaggaggttgaggttgcagtgagccacgatcatgccaatgcattccaacctgggcgtcagagcaagaccacgtctcaaaaacaaaacaaaacaaacttttatggttgaaagtgttttggcaaacatacttaaactgaaatgtgaatctctgatgaaagaacatgttacctgtaaaagtttgaagtgtcagcatttgttgcaccgaaatccagaggtgaggccaggtgtggtggctcacgcctgtaatcccagcactttgggargccaaggctggcagatcacctgaggtcaggagttcaaaaccagcctggccaacattgcaaaaccccgtctcgactaaaaatacaaaaattagccagacttggtggtgtgcgcctgtaatcccagctattcgggaggctgagacacgagaattgctcgaacccaggaggcagaggttgcagtgagccgagatggcaccactgcactccagcctgggcaactgagtgagactctgtctcaaaaaaaaaaaaaaaaaaaaatccagaggtgaatccagaggtgatcaccacatgatatccagatagcctctttccatgagaggctcaaaggataattttactgtctacagttttgcagcgagagaaacttgattttatcagtacaccaagagcagatctatgtcttcggaacagacatgagatcagaattgtctagctgctatgaacagcatgttctctccctgtacctatagacatgtatgggaaacttatttgtaaggttgtataatgagcagtgagttaaagcaaacttgacatgttgaccatagttgttatggcattggactaaagtagcctccatcactatgatagagatagccttggtgttggacccatagtttttgaagtctgtttgctaagactccctcttccttaggcagttcttcaaatattattatgctttttcctgtcatgggattcctcttcatggagtttcctttctcaggaacactatcttctcctggttaatttgtacttattcttcagataccagttgaaatgttacaaccttccctgaccctccaaactattccccgttattattctcctagcaccacttgcacctcattttcatactcactggagttgcaattcatattcattgataggattattttaattgtatctgatatcactgtcacctccactagaagatggtctccatgcgggcagagactatcaccatgtgttcttcacttcaattttcagtagttggctgtgagtaggtattgaataaatatttgtggagtaatcataatgaggtatagatattattctcatasctctattttattaattagggaattacagaattcagtgatctgctcaggatctcataaccaggaagtgggaaactaggatttgagctccagtgagtgtggcctttcattaaaaatattacagcaaccattctctttttttttttttttttttttgagatggagtcttgctctggagtgcagtggcgtgatctcggctcactgcagcctctgcctcccgggttcaagtgatccccctgccttagcctgctgagtagctgggactacaggcaccygccacgacacttggctaatttttgtattttagtagagacggggtttcaccatgttggccaggatggtctcgatctcctgaccttgtgatccgcccgcatctacctcccaaagtgctggattataggcgtaagccaccacacccggcctacagcaaccattctcttttatccatacttttttcaagagtactgtttcatcttcatgttttcagaaacaacatagcattcatgatcttaacccccaattctgatactgcctgaatatcttgaagtaagtttacttttaagaaagttgaggctaggtgtggtggctcatgcctgtaatcccagcactttgggaggccaaggcaggtggatcacttgagctcaggagttcaagaccaggctgggcaacatggcgaaaccctgtctctaccagaaatacaaaaaattagtcgggcgtggtggcgtgtgcctgtggtcccagccacttgggagactgaagtgggaggatttcttgagcttgggaggtggagtttgctgtgagccgagagatcatgccactgtactccagcctgggtggcagagtgagatcccatctcaaaaaaagaaaagaaaaagaaaattgaaatgtctagtctatcattttgtcagttctatctaatacaattttttccttatgtctaactgaaatctgctttttctaatttttacatacttgatttaacraaactcaatctttttttttttttatgagacagcctttcaaatatataggaacttaatgttatatctgcttccctccagtccccagaatagttactattttagttgtctttctatggtctcatgccagtttgtcagtatgcctagataagaactgaatattttacctcagatgtgacctgactttgaagacttaaaaaggaagcattgtgccaggcgcagtggctcacacctgtgatcccagcactttgggaggccgaggtgggcaggtcaggagtttgagaccagcctgattaacatggagaaaccccatgtttctctactaaatacaaatctctactaaatactaaatactaaatctctactaaaaatacaaaagatgagctgggcattgtggcacatgcctgtaatcccagctactcgggaggctgaggcaggagaatcacttgagcccaggaggcggaggttgcggtgagccgagattgcgccattccactccagcctgggcaacaaaagtgaaactccatctcaaaaaaaaaaagcagcagcattgtgtaatattatgtagatgttgtgtctcatgatctatcctgagaaagcttttgggaggaactgcatcatagtcatggacaacatttgtgttattaaaatatctagattattttccacaaaaaatcagttacatatgtatcttaacatgttgtattattgtttaaccttgtttattgaataactaacatgtagaaaagtatttatagcataagtatacagctgtatacagctcagtggattaccacaaagcgaatatactttcataatcaccacccaggtcaagaaataaattgttacctgtggccctaaaatccctccaggcactccaccatctttatccactcactcctctccctcaaaaccactagactactaacatcatagacaaagctagcatgcctttgaactttatataaatctaatgatgtaggattttgtgtgtatgtgtatttggcttctttcatcagcattgtatttgtgagatttatccagattgttgcaagtagttgtagttgtgcttttttacacagatttaatttttatatttttcttatatgttcgaacagttaacctgcttatctattattaaaaaaaaaaaaacgaacattcacatagttcttaccagtttacagtgttttttccacaccgtcttcaaaatgtaaagtttggtcttcaatacatcagtatgctgctagatttaaatactagggaaaaaaaaatcagagaagttaataatattaactgtcacctccactagaagatggtctccatgtggacagtaatatttctcttgtattatctgtgctaagtaaaatcttctgtaagtttctttaaatattttaataaatcatagtacttaaaatgttctcaatattctaaagtagttaaaagtaactataaaatagtacctgtttttctgatcacattttacttcctatgtgaaattttacaagtcgttactctatttatttattgatttattttttaagacagggtctgttctgtcgcccaggctggagtacagtggcgtgatcatggctcactgcagcctcagcctcctgggctcaagtgatcctcccaccttagcatcccaagtagctgggactataggcacatgccaccatgcccagctaattttaaaaaattctggggggccgaatgcggtggctcacacctgtaatcccagcactttgggaggccgaggcaggcgaatcacaaggtcaggagttcgagaccagcctggctaacatggtgaaaccctgtctctactaaaaatacaaaaaattagcggggtgtggtggcaggcgcctgtaatcccacttactcaggaggctgaggcaggagagttgcttgaacctgggaggcagagattgcagtgagccgagactccatctcaaaaaaaaaaaatttttttttgtagtgacaaggtgtcactgtgttgccagggctggtctcaaacttctgggctcaagtgatcctcccatttcggcctcccaaagtgctaggatcacaggcatgagtcactgtgcctggtcttcaagttgttattaaagcatgtttacccacattatgcacatggtataatggaaagtattgttgtggaagttaggagatagggattctagcctagctttttatttttttgggacaaggtctcactttttcgccccaggccgaagtgcagttgtgcgatctcggctcactgcaacctccaactctcaggttcaagcaattctcccacgtcagcctcccgagtagctgggattacaggcatgcgccaccacgcccggctaatttttgtagttttagtagacacagggtttcaccatgttggccaggctggtcttgaactcccgacctcaggtgatccacccaccttggcctcccaaagtgctgggattacaggcatgagccaccgcacccggcctctagcgtaacttttacatcctgaactgaccttaagaaagtataactttaggcctgtttcatctgtaaaatgttaatgtcataggagatgatcttttgagatttctttcagctctgataattttgtgtgtgtgtgtgtgtgtgtgtgtgtgtgagatggagtcttgctctgtcgcccgggctggagtgcagtggtaccatctcggctcactgcaagctccacctcctgggttcacgccattctcctgcctcagcctcccgagtagctgggactacaggcgcctgccaccacgcctggctaattttttgtatttttagtagagacgaggtttcaccgtgttagccaggatggtctcgatctcctgacctcgtgatccgcccgcctcagcctcccaaagtgctgggattacaggtctgagccgccgcgcccggcctagaatatttgtttcgattattctaaatctggtgacatttcttttgtttttaagttaaatcttcagtaaaaagaataaatgccacctagaggacagaaaaatttttacagtagattatcacagacctcatgactcattactttggtgtataaaatggcctttgtatggtgtcagcacctgggaatgtctcaaggggtgttcattgaccttctggactatctggaaatattttgatatttattggctgggcgcggtggctcatgcctgtaattccagcacctcgggaggccaagttaggtggatcacttgaggtcaggagtttgagatcagcctggccaactaagttagttgactatttgtgaaatttccctctccaaataggaaagatakgattggaaacattattcagaaggaagaagttttaaagaagggcaggcttaaagactatctaatgaatttaccaatatggtaaaaccccatctttactaaaaatacaaaaattagccaggcgtggtggtgggcgcctgtaatcccagctacctgggatgttgagggatgagaatcacttgaacccaggaggcaaaagtcacagtgagccgagattgcaccactgcactccagactgggctatagagcaaaactctgtctcaaaaaaaaaaaggaaaaaaaaaaaagaaattttgatatttatgtgagaatgacttttcacggtgttcttaatagcgcaagttttgtttaggagagcacattccaacttacttgcttctataaatataccgtgtaatctagggcttaaagaatatgtacaatgtctttttctctcccctagtcttccccttttctcactagttatatccttgactgaagagctatttcattctcaagtcttaggaatgcagggtgaagcaaaacagatgaatttttaaagcacttaaccaggctgtatgaaatcacagtctgttgtctaaaattgtaagggacggttagtagtactctcccctttctcaaaccaaatctttggttgttttaaggaagggaaattaaattcctgtgtgctagattttcaacataaaatttaaaaaactggaataatgttgcattttatgtgtataacagtataatgctttgttttaggtgggagaaggagagaaattggtgagggctctttttgctgtggctcgagaacttyaaccttctataatttttataggtaagaacatattttccaactaagttattgactatttgtgaaatttccctctccaaataggaaagatacgattggaaacattattcagaaggaagaagttttaaagaagggcaagcttaaagactatctaatgaatttagtaggacccactatattaataagtagtaaactagattaatctcagatgactcacatagcttggtctttaattaaagtcttatacttgtatttcctctagatgaagttgatagccttttgtgtgaaagaagagaaggggagcacgatgctagtagacgcctaaaaactgaatttctaatagaatttgatggtgtaagtgttgattatgatatttttaatgtggcagcattttagtatatatttcctattaaatggccaaggttaaaaatacaaatatctttatatttgttattacttttctaaatgaattgaaaaaagattttttgcttgtaggtacagtctgctggagatgacagagtacttgtaatgggtgcaactaataggccacaagagcttgatgaggctgttctcaggtagggagatttatatggaaatacatgcatttattacagacaatatttactcatgtgtccatcttacatattatttccttactctcagttttaagactaaattcactattttcttccagtactatckctagcctcttgttaccaactacataaggattttgaggtcaacagcttgatatcaggagaattagtctagtaaaggtttagttacggttttaggcaaattggtcagttcttctgggttgcattaaattatctttaaacttgaaaattgattcttaccgtcttttattgggcttcatgagaaaataatcaaatcagggttcatggaaaatgtgttttctgttcttgtgtgtttgagcagtttattcccttcatactggaaggacggtttgggtcagcataaaattcttggkcatcctttcccaaggaatttacaatattgctccattgtttctagattggctgtagtagtgtaaaagtctgaatccaaattgattttttcaaatttgtaaaataacttgatttttttctctctttactggatgggttacgtgggtatattgcacccaggtagtgagcatagggtgcagtaggtagtttttcaacccacacctcactgctttcttcccccatgtagtagtccgcagtgtgtattgttcccatgtttatgtccatgtgtactcaatttttagctccccacttatgagaacatgagctatttggtttactgttcccacattaattggcgtagtattaaggcctccacctccatccatgttgctgcaaaggacattatttcattcttttttatggctgcgtagtacatagtattccatggtgtgtacgtaccacattttctttatccagtccaccattgatggacacttagattgattctatgtctgctgtcatgaatagtacagcaataaacatgaaatgcatgtctttttggtataatgatctattttcctttgggtatatacccagtaatgggatttcagggtcaaaggtagatttgttttatgttttttgagaaatcttcaaactgctttctacaatgactgaactttacattcctaccagcagtacatacgctccacaacctcaccaacatctgttatttttttactttttcccgccaatctgtagacaatatgggattttttttgccattttattaatagccattctgactggtgtgagatatctcattgtgattttgatttgcatttttctgatggttagtgatgatgagcattttttcatgtttgttgtcccctcgtatgtcttttgagaagtgtctattcatttcctttttacccattttttaatagggttgtgtgtttttagcttgttcaattgtttgaattccttatagattctggatatcagaccattgttagatgcagttctgtagattgtctgtttactctgttgatggttctttttgctgtgcagaagctctttagtttaattaggtcccacttgtcaatttttatttttgttgcaattgtgtttggggacttagccaaaatttctttctgaggctgatgtcaagaagtgtatttcctagttttcttctagcatttttatactttgagatcttacatttaaatctttaatccaccttgagttaatttttgtatatggtgaaaagtaagggtccagtttcatttttctacatatggctagccagtaatccccatgccatttattgaatagggagtccttttcctcattgcttgtttttgtcagtcttatcaaagatcagatggttataggtgtgtggctttatttctcaattttctgtcctgttcctttggtttgtgtgtttgtttttataccagaattatgctgtttgggctgctgtatagttcggtttaaagtcaggtaacgtgatacttacagctttgttctttttgcttaggattgctttgtctatttggactctttttttgcttccatatgaattttagaatawttttttctaattttgtgaaaaacaacattgatagtttgatagaaataccattgaatctgtaaattgctttgggcagtatagtcattttacgaccagataaatcaggcaagagaaggaaacaaaaggcatccaaataggaaaagaagtcatcatactctcactcttcactggcaatatgattctatactttgaaaaccctaaaaattccgtcaaaaggctactagaactgataaatgattttaccccaagattcaggatacaaaatcagtgtacaaaaaattagtaccatttctatacgctaataatgtccaggctaagagtcaaatcaagaacacagtcccatttacaatagccacaaagaaaatgaaataatggctgggcacagtggctcatgcctgtaatcccakcactttgggaggctgaggcaggtggatcacctgaggtcaggagttcgagaccagcctgaccaacatggtgaaaccccgtctctactaaaaatacaaaaaattagccaggcgtggtggtgggcgcctgtaatcccatctgctcgggaggctgaggcaggagaattgcttgaacccaggaggcataggttgcagtgagccgagatcgtgccactgcactgcagcctgggtgtgaaagagcaagaatccgtttccaaaattaaaaaaaaaaaaagaaaaaaaaaaagacaatggagtacctaggaatacggctgatgaaggaggtgaaagaatctgtatgaggagaagtgtaaagcactgctaaaataaatcagagatgacacaaataaatggaaaaacactccatgctcatggattggaagaatcaatatcgttaaaatgggaaatttatcttaatttttttccctagttcatttttctgttttcttttgcacataaattatgtgttatgttgcrtccttttgttttccctatctgtaattttcttcttcatccttttaaactcttaggtctttttgttttgttctgttttcccaagcctgttgcctttatttcttactgggttagtatctaatctcctttctgctatatcttttgtaactcttctttccttggtggttttttattcattactttcctgacatctgttattctacttttcatcttctgttttatttctttgagcatctgtatgttatttccataagctcttacatttcactgggctcttgtttcatagaaaacaattttttggcaaggacagaccacttgaggccaggagtttgagaccagcctggccaacatagtacaaccctgtctctgctaaaaatacaaaaaattagctgggtgtggtcacacacacctgtaatcccagctactcaggaggctgataatcgcttgaacccaggaggcagaggttgcagtgagccaagacggcggcactgtactctagcctgggggacagagcaaggctctgtctcaaaaaaaaaaagaaaaaattttttggtcaggcgtcatggtgggtcacacctgtaatcccagcactttgggaggccagatcacttgaggccgggaattccagaccagcctcgccaacgtggcaaaaccccatatctataaaaaaaacttaaggataaaaaaaattaaatttttaaaaaattaaattattttatttcgtggaaagatacttggtcataattttagtttgctctatggcaaaatcttctcatgcatgttcttcattttatctagtttatgtttattgtgttttgtttgctcttttttgggggcaggttttgttgttgttgttkttkttkttttttttttaaatgagccctgtcctggtttttccttttttgcttattatttttctttgaataaaaggagttttcttggaaaacctagttttggaaggatattgtaggggaagggataggtatcttgagtagtccatgtatacactaaactagcatgcagcctccctcacttacagtgaagccctacctaataatgaagtatatgtgtatgtaaataagagatagggttgatttattcttctactaaaaaatattggtcactgcaagacattgtcttcccgccagactgttagatgccttcttataaagataattcgtcttagagtttctttgttcattctcaccttccttgccattcctatgctatcaattagggtttatatggtctgcagagccaggcttcatatgcttgtttaaatgtggagggactggccttattaccctttagggtgtgctatctctttttgggaggaaaactgtactctgacagtcatgtccatgatctttagcggcagatcctttgtgtgtcttcctttgtcagtgtaattttcactgccctaggcagttcacctttatgtattttagttccataaatgttacctagtttgttgatgaagtgtatgtttctgtttctattatccttgctgattttagtttttttcagattcaagaagacagatctacttatatcagatattttgtttgttttaaagcattactgctattaaaaacatatacatacataaatgattaattctaacaataccgaattaaggattttaaacattaactagagttttaaaagagtaacaaaaatatttttacattgataactaccaaaatgcattccagtgccttgaatattatattttaaaagcttttcctgtcatttgctgtttcagctttaaattcaaaattatatttctaaaagtgctggatttttttttttaggcgtttcatcaaacgggtatatgtgtctttaccaaatgaggasgtatgtatctgtgtttgaattttttttgttttagagcagaaacaagaactaccatcttgacaatattaagtcttccaatccatggtacagctactttggaaaacagtttagtggtttcttaaaaagatgtacataagcttactgtcagagccagcaatttcactcctaagaatttaccccagagaaacaaaaatgtatgtccacacaaagacttgtacaagaatttttatagcagcaatattaataatagccagaactacaaatgatctaaaatgtttattttggtgaataaacaaatgtggtatattcatttaatggatactgttatccattatacatgctgcatactcacttcatatattaagttttatgaatgaaactccaaaacattataagtgaaagaagcaagatgatatatgtcgcatatcataggattctgtttatatgcagaaaacgcaaatttattttttatttatttatttttttgagatggagtcttgctctgtcgctcaggctggagtgcagtggcgtgatctcggctcactgcaaccttcacctcctgggttcaagtgattctcctgcctcagcctcctgagtagctgggactgcaggcatgtgccaccaggcctggctaattttttgtgtttttagtagagacgggtttcactgtgttagccaggatggtgtgatccgccctcctcagcctcccaaagtgctgggattacaggcatgagtcaccgtgcccggccagaaatcgaaaatttctagaaacgtaaagcagatcagtgggttgtcagggtgagagttgggaatgaggattaactgcaaacaggtatgagtgaactaaaaagtgttctaaaactggattgtggtgatgattgcacatctataaatgtattaaaactcattgaattatatacttayaatgggtgaaattcatagtagatgaattcatacctctataaaactgkttttttgcagcaaaatatttattgctatgtttttattcaagtgtggtgaattattgctatgtttttatccaggtgtggtgtctcacgcctataatcccaacactttgggaggctgaggtgggaggatcgcttgagccaggaattcaagaccagcctgggcaacatagggagaccctgtctctacaaaaacttttttagaaattaaccaggcatggtggcacgtgcctttggtcccagttactcgggaggctgagatgggaggattgcttgaacccaggatatcgaggctatagtgagctatgattgtgccctgcactccagcctgggtaacagcacaagaccctgtctcaatataaaaaaagaaaagaatcattaattctgaaattagactgaatgatcattttttaatatttttcagacaagactacttttgcttaaaaatctgttatgtaaacaaggaagtccattgacccaaaaagaactagcacaacttgctaggtgagtaatttggatttggtttatcttacagcttttatttattttttgtaaataattctttttttagttatttaaagtaatcttaagtatgaaatgagtaattcattgatcagaagactttctctcatcctctacctcctttgcctttttcttacctcttgttcttatatatatatgtggaatctaaatttcactggctatgtcctttgcaagacgtgatctaatgatgatagtatattctttttataaatttattaaaacctgtaagtggtattaaagtaatttaaacatttacaccttaggcaacatggtaaaaccccatctctacaaaaaataaaatgagtcaggaatggtggcacatacctgtagtcccagctacttgggaggttgakgtgggaggatcgcttcagcccgggaggtggaggttgagcaacagagtgagaccctgtctcaaaaaaaattttaaacatttcatattgcacactaacacagatatttttatataaacttgttcttggcatatgctgaatacttttcagctcttttaataattttaattatttgataattttaataattttaatttcagctatttgaataatcttaaactttatgaacagtgtgaagtagaaactgagtataggagatgcgctcatgaattttattccctgaaaaatgtcataaagtaatataaagtattcaatgagtatgtgagtattgaataattttaacaagaactctgagttcccagatacctatgacaaaagaacaaattacttggaagtctcttctactccagacctttctgtctatccccttatttaaaaaaatgtacattgattgtcccttatcccatcaagagagtgttctttgccaagataaacgctaattagagaagtaattgtgtttatgtgtcagttggccaccagtagtttgtagatgttacctttccaggtgacatgtttacaatttaatgaagcctctggagatagtatgccttaatctaaaggaatggttctaatgattaaaatttgaggcattactacatttgttttcagcaaatgggcctttctattcccttaaaatcaaaccctcataactatgggtttgctgacaaagggaaactagtttttactcttattatatggagattttaaatctgcagagatgaaaataatttgctgtttcagctgggtgcggtggctcatgcctgtaatctcactactttgggaggctgtggcgggtggatcacctgaggtcaggagttcgagaccagcctgaccaacatggcgaaacgccatctatactaaatacaaaaaaaaaattagccaggtgcggtggcgcatgcctataatcccagctacctgagaggctgaggtaggagaatcgctccaggaggtggagatcacagtgagccgagatcatgccattgcactccagcctgggcaacaagagcaaaactccatctcaaaaaaaagcgggaggggaaataatttgctgtttcttccttcccttcctcagaatgactgatggatactcaggaagtgacctaacagctttggcaaaagatgragcactggytcctatcvyaggtaggtatacaagagcttaaaacatttagaactatttattataccaccttagaagtttaagaagtccaaaaaaatctaccaagagattttttttttcttttggagacagggtctcactctgttgcccaggctgtagtgcagtggcacaatcatagttcactgcagcctcgaaccccccaggctcaggtgattctcccacccagccttcccagtagctgggactacaggcatgcaccatcatgcccagataattattttattttatttyttgtagagacagggtttcaccatgttgcccaagctggtcttgaactcccgggctcaagtgagcagcctgccttggcctcccaaagtgctgggattacaggcatgagccaccatgcccagccttaaaaccattcttagctcacagatcatacaaaaacagtctatgagccagtagactgtgacccctgttctaggcaagaggtttcatttcttgatagtaagtaagcagcagaaaactcaaaaagaaaactttaaacaaaaaagaataatgtaaggaaaatgttcttatctgttttctggctcttttcagtattctgacatcatttgaaattaatgtgtctaaaggaaattctataagagaagttttcacttttttaattatatcttttgagggattgcagcaaaatatttattgctatgtttttattcaggttacttggttgattctgaaataccacgaccaattctttttaggttaggttaggataaactcacacagatattttcagctacatttccacagccagcatcggtagtggatggttgatgctctcaggtatgcactcagattattagctatgatgataaagtaatcataatagctccatccctttctctcattcaagaaagtacaattgaatgtagttgtacgagaaagatgttatcatagtgtctactgtaatttgcattaaaagcctacattatacaaacctttttgttttactagttaaaaattaccagtaacacctcccgtagtgaaatagggtgctgattaagaactgctactttgcaaaataaaaaatgtaatcttgagagtatattttgaaactctggatgaacaaattttcttgctgctggagcttaaatcttgttcagttagtggatttagaaacagtagctaatgcataaatgagttgtattttcttagaacgttttggctattctaaggtagacaaaatttgggtttaaaaaaagattcgcatccattaaagtacagaaaatggccgggtgcagtggctcacacctataatcccagcactttgggaggccaaggtgggaggatcgtgtgggcctaatagtttgagactagactgggcaacatagggagatcctgtctctacaaaaaaatataataaattaaccaggcccgttggcatgagcctgtaatcccagctactcgggagtctgaagtaggaggatcacttgagcctggaaggtscaggcagcagtgagccatggtcatgccactcactgcactccagcctgggtgggtgacatagtgaggtgctgtcttaaaaagtaaataaataggccaggcacggtggctcacgcctgtaatcccagcactttgggaggccaagatgggtggatcatgaggtcaggagttcgagaccagcttggccaatatggtgaaaccgcatctctactgaaaatacaaaaattagccaggcgtggttgtgcgcacctgtaatcccagctactcaggaggctgaggcaggagtatcgcttgaacctgggaggtgaggttgcagtaagccgagcactgcagcctgggcaacagagcaagactctgtctcaaaaaaaaaaaaaaaaaaaaaaaaaaaaagtaaatacataaagtgcagagtaaaaacaaaaaaagactaatgcattttgtaaagaacaagttgcattcttttaagttccctttcaaatttgtgaactattgtttttgggcagtatgcaagaaattgaacactttccagttattccwaagaaggaatattctcttctcagcatttataaattgtatttgctctcaaagttaacatgtgtctcttttttttaatataatgatttgtactgaatagatacatgtagatcattgtacttggttttgcccttcaacaatttcaactgcaraatgtatgtatttttaagtgcctgacttttatgttttacagaactaaaaccagaacaggtgaagaatatgtctgccagtgaggtatagtattttacaatgatattttctttgtcttctatattgtaagacatatataagacatacatatatgaatgtgtgtgtgtgtggtttttttttttttttttttttttttgagacagtctggcatgatatcggctcactgcaacctccacctcctggattcaagctattctcctgcctcagcctcccaagtagctacaggcatgtaccaccaagcccagctaatttttgtatttttagtagagagggcatttcaccatgttggccagtctggcctcagactcctgacctcaagtgatccacccaactcggcctcccaaagtgctgggattacaggcttgagccgctgcatctggctgttttgtttgtttgtttgtttgtttgtttgtttgtttttttgagacggagtctcactctgtcgcccagactggagtgcagtggtgcgatctcagctcactgcaagctctgcctcccgggttcacgccattctcctgcctcagcctccctagtagctgggactacaggcgcccaccaccacgcctggctaattttttgtacttttagtagagacggggtttcaccgtgttagccaggatggtctctgtctcctgatctcgtgatctgcctgcctcagcctcccaaagtgctgggattacaggcgtgagccactgcgcccggcctttttttttttttttttttgagacacagggtcttgctctgttctcaggctggagtgcagtggtgcaatcgtggctgactgtagccttgacctcttggtctcaagcagtcctcttgtctcaaactttttagtagctgggactacaggcaagtgccacaacgccccactaattttttaattttctgtagagatggtgtctctccctgttgcccagggtggtctcagactcttggcctcaagtaatcctcctgcctcagtctctcagagtgcttgggactaattttttttaatggatttttytagttgattagaagctagaaaaaattaactttgcttcatttcaaaatatggaaacctatgaaatagtcaaaattttttttggtaatagacaaaacatatatacataaagtcattttctatcaaatcatattacataaataccaaacagaagaaaattacaggccgggtgcggtggctcacgcctgtaatcccagcactttgggaggccgaggtgggcagatcacttgaggtcaggagttcaagaccagcctggccaacatggtgaaaccctgtctctatcaaaaatacaaaaaaattaggccgggggcggtggctcacacctgtaatcccagcactttgggaggccgaggcgggcggatcacgaggtcaggagatcgagaccatgctggctaacatggtgaaaccctgtctccactaaaaaatacaaaaaaattaccggggcgtggtggcgggcacctgtagtcccagctacttgggaggctgaggcaggagaatggcgtgaacctgggaagtggagcttgcagtgagccgagatcgtgccactgcactccagcctgggcgacagagcaagactccatctcaaaaaaaaaaaaaaaatagctgggcatggtggcacgtgcctgtggtcctggctacttgggaagctgaggcaggagaatcacttgaacttgggaggcagaggttgcagtgagccaagattgcmccattgcactctagcctgggcgacagagtgagacccagtctcaaaaaaaaaaaaattacatgaaacttgtgggggtttatacaataaaaataacctataactatacgttaatcctttaataatgttctattttgtttttcaataacctttatttttttaattaatttcttttttttgagaaggactctggctctgtcacccaggctgcagtgcagtggcaccatcttggctcactgcagcctccacctcccaggttcaagcgattctcctgcctcagcctcctgcgtagctgagattacaggcatgggccaccacgcccagctaatttttttttttttttttttgtatttttagtagagatggggtttcactatgttggccaggtgggtctcgaactcctgacctcaggcgatcgccagcctcggcctccctaagtgcaaggattacaggcgtgagccaccatgcctggccaatttattaccgtttcttaatatggaagacctccttatgagatgctgaagcatttcatttgaaaaaagttgcatgtaaaatataaaattgggtatgcagaatggtcataactctgtgagcaaaattttgaaatcaggcttgaattacagtcagccttttctatccgtggattctgcattcatggattcaaccaactgcagatcaaaaatacttgggggaaaaaagcatctgtgttgaacatgtacagacttttattcttgttattattccctaaacaatatagtataaaaactatttacattgcatttacattgtattaggtgttataagtaatctagagatgatttaaagtatacaggaggattgtgtaggttgtatgcaaatactgcaccattttacataagggactttaagcgtttgcggattttgctatctatgggggaaccaatttccgagagatactgagggacagctgtatatttgtaacttattttttatttccctaattgcagcagctgttgaggggacagtgaactgttaacacagataacaagtgtattcaagtacattttggagtttgtttgtttttttttttcaggcttttattcgcctgtcggatgaggcaccatacttgaatttttttttttaagaaagcttttagttttctttctttctttttttttttttgtgagatggagtcttgctctgtttctaggctggagtggagtgcagtggtgtgatctcagctcactgcaacctccgcctactgggttcaagtgattctcctgcctcagcctcccgagtagctgggactacaggtgcacgccaccacgcccagctaattttttttttttttttttttttttgkatttgtagtagagacagagtttcaccatgttggccaggatggtctcgatctcctgaccttgggatccgcccaccttggcctcccaaagtgctagggattacaggcatgagccaccacgcccggctgaaagcttttagttttctaacttatttaatttaatttaatttaatttatttttattttattttttgggacagtgtctcacttggttgcccaggctggagtgcagtggtacaatcatggctcactgcaccctctagctcctgggctcaggcaatcctcctgcctcagccttttgagttgctgggactacgggcatgtaccaccacactcagctaaatttttaattttttgtagagatggggtctcactatgttgcctaggctggtctcagattcctcaagcattcctcccacttgcacctcccaaaatgctgggattacaggtgtgacaccgtgccagacttgaaatttttaatcccacacctaaaaatataattttatccaccattttttaaaagtcataacattatttattaaaaatttagatggtaaaactaaaaattaaagcttaataaaactactgagtgatttacaaggaagaatattactggtcccttttgtgagcatcccattaattatatatattcaggttatattgttacaatatttggttctactgtatacttttttttttgagactgagtttcgctgttgttgcccaggctggagtgcaatggtgcaatctcggctcactgcaacctccgcctcctgggttcaagtgattctcctgcctcagcctcctgagtagctgggattacaggcatgcgccactatgcctggctaattttgtgtttttgtagagacrgggtttcactatgttggtcaggctgatctggaactcccaacctcaggagatccgcccacctcggcctcccaaagtgctgggattgcaggtgtgagccaccatgcctggctctactatatactttcattcagttgtttctttttaatctagtggttttggtattaataatttgataatgacctttagctgttattgcttacttatgagttaatatttataaagcacttaaagtagctggcacgtagtaaacactatgtaaagatccattaaataactttaaaaaatataaaactgatagtggcattttattatagagattaaggtaatccattctctcatttccatttatgggatgagacgtaaacacaagtagtttgctctctaaaactgtatactagaattttatatacccattatttgatgcaactttaataccaaagtgtattgtcagttaccggtgaatatatataaatttaggtaaggaaaacccaacttggtcgcacacagtggctcacgcctgtaatcctaccactttgggaggccgaggcagttggatcacctgaggtcttgagttcgagaccagcctggccaacgtggcgaaaccccgtctccactaaaaatacaaaaattagccgggcgtggtggcacatgcctgtaatcccagctgctcgggaggctgaggaaggagaattgcttgaacctggggaggtggaggttgcagtgagctgagatcgtaccactgcactccagtctgtgcgacaggagcgagactccatctccaaaaaaaaaaaaaagaaaaacccaacttatcttttacagtttataatagtagaagttcaaataattggtttggaatttctgtatttttaaggttagtactaaaattgttggttataaattggggtacaatatactttgttttttaagtaccttgtgtatctaatttaactttaagtcctttattattttggtttgataagacaacttttctacttatttccccccttaactgaaccagctaccatctgcctttttcctgttgtatacattagtctcttacgttaaaatatcatataagtttcatatatatacacatatcaaactatagacttaaagtacaattacatcaacatcttttaaaaccttaatttctggccaggcgtggttgttcatgcctataatcccagcactttgggaggctcaggccattggatcccttgagctcaggaattcgagaccagcctggataacatggtgaaatcctcatctctacaaaaattacaaaaagttagctgggcgtggtggcgcacacctatagtcctagctacttgggaggatctcttaagcctgggaggcagaggttgcagtgagccgagatcatgccactgcactccagcctgggtaacagtgagaccctgtctcaaaacaaaaatattaatttctataacaaataaattttatttagtaatatcatgtttaatacccatgttacattcattattcttctacactttggcctttaggaagaggcagtgtgtgtgttacagttaaataggaaacaagtagggttcatatagtgcttatggggttttctttggtggggggttgctgggtttttggggtttttttttttgagacagggtatcactctgtctcccaggctgaaatacattggcatgctcatggctcactgcagcctcaacctcccagactcaagtgatcctcccacctcagcttccctagtagctgagactacaggcgtgcgccaccatgcctagctaaattttgtacattttgtagagatgaggctttgccatgttgcccaggctggtctctaactcctgggctcaagtgatccacttgcttcagcctcccaaagttctgggattaacaggtgcgagccactgcagccagcctatattttaactatatgtttttttctttttggctaaaatttttcagattagtttacaagttacaagtgtaggtgatatctcatggagatatcaaagatgatatgaagttagattgggtttttaagagtagtttttaaaatacggataaataccagttgttggagttttgtttaaagttctttaacttcttatttttgggccaaaatacaggtatacgctagaaatgatttttaacacaggtcatttatgccaaactgcattttgccttaatttttttttttttttttttttttgagagggagtctcactcattgcccaagctggagtgcaatggcacgatctcggctcacttacaacctccacctcccaggttcaagcgattctcctgcctcagcctcctgagtagctgggattacaggcacctgcctggctaatttttgtatttttagtggagacggggtttcaccatgttggccaggctggtctcgaactgctgacctcaggtgatccacccgccttggcctcccaaagtgcggggattacaggtgtgagccaccgtgcttggccaaaatttttattaatttttctattgcctggactctgtgaacctatccattttgccttttaaaaatacttaggtgtaaatatagatattcattaactcagcattgttttaatctatatttccaaaggcaatttaaaagatcagaaaataagaccaaattaatataaaaatgcatactttaggctgggcaaagtggctcacgtctgtaatcccagcactttgggaggccaaggtgggcggatcacctgaggttaggagttcaggaccaacctggccatcatggcgaaaccctgtctctactaaaaatacaaaaattagctgggcatggaggcatgtgcctgtaatcccagctactcgggaggctgagacagaagaattgcttgaaccttggagggggaggttgcatatctgagtggtgaaattgtgattctttttttctctttgtctgtatttttgaacttttctataaatgattgtgttttgtttttatattggaaaaatattatgctttcaaatgttaatacctatgaaactaaacacaagtaataaatatattagtatagcatttattaaggtttcttgtgtagcagatcaacatagaaaatatatttaaatggctgacataattttctaagaatacatacacgtatattttttataacattaagaaacagcagcatcattactttaatccatcatttcgttaaccaccatatacctgttgatcatttgtattgtcatgtgctttttaaaaatctagatgagaaatattcgattatctgacttcactgaatccttgaaaaaaataaaacgcagcgtcagccctcaaactttagaagcgtacatacgttggaacaaggactttggagataccaytgtttaaggaaatacctttgtaaacctgcagaacattttacttaaaagaggaaacacragatcttcaatgaacgtcatcggctacagaaacagcctaagtttacrggactttttagagtcttacatatttgtgcaccaaacttgaagatgaaccagaaaacagacttaaacaaaatatacaatgcaaatgtaattttttgttgtttaaggccttgccttgatggtcacagttatcccaatggacactaagttagagcacaacaaaacctgattctggtcttctttaccaatataatcataatgtaaataataatttgtatattgtgttgcagatgaaagtattccaggaacagtgaatggtagaagacacaagaacatttgtttgtttgtcttctgatgttttttcttaaaatagtaatttctsctacttttcttttctactgttgtcttaactacaggtgattggaatgccaaacactcttaagtttattttcttttttcgttttataaattcagtgtgccaaatgaaacttttttcctaagtaactgtaataggaaaaagtttattttgagagtttcttcttcataaatctacagacattaaacaattgttgtgttctttttaccttttatttttctattaccttgctaccaaacagtttagatagcaatataatagcaaaaaagcaaatatggtaaaatagagaaggtttgaaggtttgagttactctgtcatataacatgtagatcagtcttcatgtgacctgcagtatttttttttctaatgtatttgtcagaaatctgttgtagactgttaacttcttcctgatggaatttattttctgcaagaattattctgatatttaagagagccaattttaactgctgtgaaaatgtttccagtgcaagagaagggaaatactaggaactaagacatttctaatttattgcttattactttcttaattttacaggataattataagcaagtggaactaccatcttttattcttaataattattaatcccttcaatgaaactttaaaaaaactgaatttttatacatggcatacatttttctagttccttctgcttgctttattaactcaaaagttctagttctagtctgttgatctgccttttgttctcccaaaatgtacagtaattccatttgtttgtataaatatgcctggattttcattataaaaatgtcattgtagggagtagagactcatatcatggccttttaaatattgtaataaaggcaaatagatatttgcccttagtttactggttaaaagtttgtttacagaacttttctctggtgcttaaatgatgctatgtaaaatgtcatgagtggaaagaatatttgtagtagtaacaagaatttttcatttaggaaagatttcttaggttttgaaagaatacattaaaataaaaaacttgcccctactaggtaagaactttataatgaagacatacattcttcttaattttactcttgctcttgttaaagatttgtttgaatatagaagatgcatgatttctgggkttttttttttttttgagacagagtttcgctcttgttgcccaggctggagtgcaatggcgcaatctcgactcaccacaacctccgcctcccaggttcaagcaattctcctgcctcagcctcccgagtagctgggattacaggcatgcgccactaccccagctaattttgtatttttagtagagatggggtttctccatgttggtcaggctggtcttgaactcctgacctcaggtgatccgcctgcctcggcctcccaaagtgctgggattacaggcataagccactgcgcccagccagaagatgcatgatttcttaggatcatatgctgtttgtagccataaggtaaatcatgtctcttccaatcatgactttggaactccctgaataataaaaatgagagttgagataaataggggaaaaaaaatttttttcaagccagagctatgcatatgttaggtgatgggtagtatccctttaaggtctcaaacattacaacatcaattatgaaatactgataacgaaaggtagtaatgaaatatatatgatgaaaagaattgagaagttctaaattaagacatttcagttaagctcataaaatttcattgttttcatttaaaaggagattaacgttattgatacttggataactggctaatcatattaaaggactatgtggttccagctcaacttttaatatattgtctcctttaaaactatcatgrttataattctattgggaaagacttttagataacaaagatttcaaatgttaaaagagataaaagtcaggttaatactatcttaaacactgagtcagaaaatcattactgtatagaagttgctttcctgatcaagtctgaacttcagctagtgctagagaactattttctatgacttaactctaaccaagttttattttaagctgtttctttgatagaagggccatgaaaatagagtaatgatatagtaggagataagggattggtttggtctttttcaataaagatagaagttgctgaagttttctgaattaataatgacttagattgtgaccttttagattcggtgttgagctctgtgttgtattacttcctaaaagataatgcttaaacattaagcattagtgtgctcttcatgttaatatggcagagttttgtaaactaaattaaaacttactgatatattggactttgagccaagggaaagaatgagtactatctttccagatatcttaagggtaaaagcttattctaagacagtctgtccattgagaatattagatttctgacttgcaaatatgtttgtactccagaagaattagaggaaaagcagatactagaattctaatttaattacatatacagccgtctttgtttatagtgtagaattctttatattttgtacaaaaactaattcttttggtaaaatgaaccatttacagttcggttttggactctgagtcaaaggattttcctttaaatgcttgtctcaattttagtctggtcttttgtacttttcttcagaagaaatgaattaaagggtacagttgcataaagtgggtttttatcctaatgtattggaaataaatgataaactttattttgtctttacttttttactttaaaactttttgatattttaggggttggagtctgataatgaaggagttgtgtgtattggactcttagtaacaattataaacgcttaacaaaatatagaaagcaatgattgggtggctctgcagagcaatcaaaacaaggtagaaactgcaaagtcctataatggaagagattcaggctgggtgtggtggctcatgcctgtttgggaggccagtatgggagaatcgcttacactcaggaattcaagaccagcctggggaatatagggagaccctgtttctgccaaaaaaaaaaaaaaaaaaaaactaaactaaaaattagccaggtttggtggcctacacctgtagtcccggttactcaagaggctgaggttagaggatcgcttaagcccgggaggaggaggttgcagtgagccaagatcacaccaccacactccagcccaggttacagagaacctgtctcaaaaaataaaaagtaaacgagattcaccttaaccagcttttacccatagggcaatttccagtttgtgcagttcacttggatatagaattcaggtagaatgtgacagttttgacaggctgaggaatcatttgggacttctagaacacctgaaaattagaagagaaattttgggaaggagagtgcctcagaaagtaagctctaaaatctgcctacatattcctttcaaatccttggtggattccaaaattgtgctggtgcagtgtgattatttaaaggaacccaggagaaagcaagttaaagtctaaaaaactcagcagcgattgcagctgcccaaggacagagagtttgaaattcaagttccactaagaaggactgagtaaatacttggtgtttcccattgaacccccaaaatgccacgccttaaggaagaatgacagcatcctagaactaaaggctgtgcttcagcactaaggacaaaatggaaataaacttactgtaatgaagcttaaaatcaaatctcacagcatcaaggttatccattagtaatttaaaaccagaacaaaacacagcattcttgagaagaaaacaattcagtcatcacagcatatatccaaagctcagtacataataaacagttactaagcatgcaaagaaaaattatgtgatccttttgactcaacttccctgatggaaaaaaaaaagtggtccataccatactcaacagaaaatatacagaagcagatgcacaagtgacctctatgagagtgattttaaaatagcgttaaaatatgttaaaagaatttacaagaagagataatgggtgaatagatagggagtttcagcagaaaaataagaattgaaaacccaacagaggccaggcaccgtgcctcacgcccgtaatcacagcactttgggaggccaaggcaggtggatcacctaaggtcaggagttcaagaccagcctgaccaacatggtgaaacccggtctctactaaaaatacaaaactagccgggcatgggtgatgcatgcccataatcctagctacttgggaggctgaagcaggagaattgcttgaacctgggaggtagaggttgcagtgaaccaagatcatgccattgcactccagcctgggcaagaagagcaaaactccatctcaaaaaataataataataattggctgggcgcagtggctcacgcctgtaatcccagcactttgggaggccgagacaggcggatcacaaggttaggagattgagaccatcctggctaacatggtgaaaccccgtctctactaaaaatacaaaaaattagcctggcatggtggcgggcacctgtagtcccagctactcgggaggctgaagcaggagaatggcatgaccccaggaggcggaacttgcaatgagcccagatcgcgccactgcactccagcctgggcaaccgtctcaaaaataataataataataattagaaaataataaaaaataacccactggaaagtcttgtaatgaaaactacagtatctgaaattaaaaatttaaatggatggacttaacagtaaactaggcacaacaggaaagactgaaaaagacaagtaagtatcaaaccaaagcagagagagaaagaaaaaagaaatagcagaggtttgagacctttggaacattatcagttcctgtaatttgaagtaaagaaggaaaggaagagaatggggcaagagaaatctttgaagcaatgatgcgtgaaattttccccaaagtgttgaaagacatcaacgtacagatctaagaagttcactgaatccccaagcagaataaatacaacaaagactacatctgggtacatcacattgccaaaaaaaaaaaaaaaaaaaatcttaaaagcaatcaaggtggggagtgggaaggagtagcattacattcagataaacaagagtgatggctaacctcatcagaaatgatggaattaagaaaatgatggaatgacatctttaaggtgcaaagatgaaacaaaggttaacttaaaactctgtatccagttaaaatatccttcaagatgttaaggcaatggccaggctcagtggcttatgcctgtaatcccaacactttggggggctgagacaggagaatcccttgaggccatgagtgaccagcctgggcaacctagtgagaaccccatcaaaaaataaaattagctgggcatgggctgtggtcgtgctactgcactccagcctgggggacagagtccctatctcttgaaaaacttaagacaaaatcttttccagatgaaaacagaatttgttgctggcagactgactttatacggaatgctttaagaaattcttcaggctgaaggaaaatataaatctggagtgaaaaacgtagtatctgaaattaaaattttccttggatggacttatcagtaaatggatttcccaatgggaacctgtatctccaggatggaattaagaattttgaaatgataaacatgttggtaaataagaaagacatttttcttttttatttttctaaatatcattgctgtttaaagcaaacaaaaatagtattgcagtgtttataatatatgtataagtaaaatataggacagaaatagcatgaagggtcagagagggcaataaatgtaattatattgagataatattactatattgtacacaaagtgagatagcattagtgtaaggtagattgtgataagaatgcattttgtaatctctcaccccatcactggggtgcagtagatctaaaaagccattagagaagataaaatgggtcactaagaattatgtgattagtcaaatgaaatcaaggaaagaaaaacagagcaaagaagtgtaagataaaacagtgggatggaagagctgaaattaataatgtcactaaattgcttaccttcctccttcctgaactgttgtggattttttttttttcagggggttgaggtttttttttagagacagagtctctattgccccaggctggacagcagtggcgtaatcagtctcaaaatccctgcagtctcaaactcctgggctcaagtgatcctcctgcctcggcctcccaaaatgctgggattacaggcaggcagagccaccacaccctgccagaactattgttttaaagtcattaggtggttaagccctcgagactatgtgcaagtttgatgattcgttaggagcactcacaggactcagcatatagtcttattcccaacaatgatttattagagcaaaaggatatgaagcaaattcagcaaagggaaaaaaggaattaagtgaagtccagaggaaaccaagcaccagcttctaagggttctctcctaatgaagtcacacaggatgtcactccagcaacaagtgacagcatgtgaaagtgttaagcctcactgttagacatagtaagcttgttagggaatagagggaatctcccctcaaattcaagttcccagatgcctggcaagggccaaccttgccagcaggactttctggggatagcagtcccaggcacgtgtttgcacagtggttcagatcaatgtgcttacattgggtagaggggacctatggaagtccaaatttgggtgtcagagacctaatagggtgaagacagtgtctacaatgatggacagctaggtatgaggtgtcagggacagattgaggcagttattcacatggtggataggggcaacctggaatgaggaataagctcaagcacagaaaggggtgtccatatggggtaagggtgtcagcagagatggtagattggttgcacaccaaagacttgatggaataaagtgaatatactaaccacagagaaggtaattataaatacagaaaggggggaaactagaatgaaacctggagttcagcttgaattgggtttaagaaagtgaattcatggtttaaaatctataaaaatagatgaaatatcggctgggcacagtggctcacgcatataatcccagcactttgggaggccgaggcgggcagatcgcttgagatcaggagtttgagaccagcctggccaacactgcgaaaccccatctctagtaaaaatacaaaaattagccaggtgtggtggtacacacctgtagtcccagctacttgggaggctgaggcacgagaatcacttgaacctgggaggcagaggttgcagtgggctgagatcgcaccactgcactccagcctgggcaacagagcgagatcctgcctcaaataaaaatagaggacatataagcatataaatatacacgtgtgtatgtgtccaaatatgtatattccctagtctgtccaccaaggtggccttggagcagttatgctccaataataatgagcacataaagtacccatatcttgccttccaaattcttcactgtcttagtctgcttgggctgcattacaaaataccatagactgggcagcttaaataacagaaatttatcctcacagttctagaagcttggaagtccaagattaaagtaccagccagtttggtttctagtgagggctttcttcctggcttgcagatggccaccttctcaccgtgtccttgtatggcagacagcacaagctctctggtgtccctttttaaaagggcattaatcccatcatgacagtcccatcctcattatctcatctaaccctaggtacttcccaaaggctgaatcaccaaagaccatcacattgctggtgaaggcttcaacatatgaatttgagggacacgaatattcagtccataacatcaactaaaggaaccaagactctttgataaaatggctaaattcagggctggggcagagaaaatacatgagtgtggaacttcttgtgccagagagaaaaagtgcccaaagattgatgaggatgaatcattgaaatgacacacagattaaaagggttcccactggacaaatttgagcatcaaaataagtaatagtagtaattaattataacccatcagaagaaataaaccatgagctcatgtgaatatatgaatacaaacataaacaaattacaagcataatgaggaatgtgatatttatatggtttaaaggtacctctccaggccgggtgcagtggctcatgcctgtaatcccagcactttgggaggccaaggcaggtagatcacctgaggtcaggcatttgagaccagcctgcacaacatggtgaaaccctgactctactaaaaatacaaaaattagccgggcgtggtggcacgtgtctataatctgccactgattaggtgtgtgattttcccaagcaggggataatagtagtacctatgtcaaaggctgttatgaggattaaatgagctaacacataatcgtgctttttttttttttttttttttttgagacagagtcttgcactgtcgcctgggctggagtgcaatggcacgatctcggcccactgcaacctctgcctcccaggttcaagtgattctcctgcctcagcctcctgagtagctgggattacaggctcctgccaccacacctggctattttcaatagaga
